United States Patent Application Publication US 2026/0223860 A1, published August 6, 2026 (application 19/147,090).

The application's sequence listing, which the Patent Office published only in electronic form, follows.

SEQUENCE LISTING (9 sequences)

SEQ ID NO: 1 - DNA, 39435 bp, unidentified
  source 1..39435: mol_type = genomic DNA
atgagcgcaccccgtaatgggggcgacgacatagcgttaatgaaaaggtcattcgtggcctttctttttgtcctgtggagagccctcaacctacccaaaccaaccaagtgtcagatcgacatgtccaagaagctcagctctggtgacgaacgtcgattcatccttcaagcattccgaggtatcggcaagtccttcatcacctgcgcattcgttgtgtggaagctgtggggcaacccggacctcaagttcatgatcgtgtccgcttccaaggaacgggcagacgccaactccatcttcatcaagcggatcatcgagctgcttccattcctccacgagctgaaaccacggacgggtcaacgagactccgctctggccttcgacgtgggtctcgccaagcctgaccactcgccctcggtgaagtcggtaggtatcacaggccagctcacaggttcccgtgcggacatcctcattgcggatgacgttgaggttccgaacaactctggcacccagtctgcgcgtgacgccctgggagaacttgtgaaggagttcgatgcgatcctgaaaccgggcggtacgatcatctatctgggcacacctcagaccgagatgaccctctatcgtgagctggaaggccgtggctacgtcactaccatctggcctgcgagataccctaaagatcagaaggattgggactcctatggcccacggctggccccgatgctggaggctgagctgagagctgatggttccctgttctgggcaccgactgaccctgtacgcttcgacgatacagatctcagggaacgtgaactctcctacgggaaaggtggcttcgccctccagttcatgctcaaccctaacctcagtgacgccgagaagtaccctctcaagctgcgtgatttcatcgtagggacgttcgacatgatgaaagggccaaccaccctgacatggatgccaaacgccaacaacgaggtcaagggcgttcctctggtgggtctcaaaggtgaccgcttccaccgttacgaagctgtaggtcaggccactgcgcagtacgctcagaaaatccttgtgatcgacccatcggggcgcggtaaggatgagactggctatgcagtcctgtaccagctcaacggctacatcttcctgatggacgctggtggcttccgtggtggctacgaggacacaaccctccaagccttatcgaacctcgccaagatctacaaggtcaatgaggtcgtgatcgagggcaacttcggtgacggtatgtacctcaagctgatcagtcctgtgctgaccgctacatggccgtgcgcgatcactgaggtcaagtccaagggtcagaaggaactccgcatctgcgacgttctggagcccgtactgggcagccataagctggttctcagcgaggccctcatcgacaaggactaccggactgcgctcaacgctgacgggaccacggacatcaagtacagcctgctctatcagctctctcggatcacccgtgagcgtggatcgctggcccatgatgaccgattggatgcccttgcgattggcgtccagttcttcactgaggccatggagaaggattccaagctgggcgagtcggaactgatggctgagttcttggaggcccagatggagaaccaactgatgggctttgaggacgtcagaaggatcgcaatcagtgactccgtggacatcatgttcgacgatgaaggctcaatgaccaactatatgggctggtaggaagtctgcatgatcgaagcatgatcgacgaagtttatttaccctcactattgggagaggcccaccttaagatacctaagagattcctaacaagatctcagcaaggttcttaaggtggtgcctctaacctttgggttcctcaggatgaggtccgaccaaaggaactggaccaaggatggttatcaactatgatcattatcaagaaggagaccacaaccatggacgtagagaaagccaccgtgctgctcgtactcaagcggttggctctctccaagaccacctacaagctcatcggcaccttgctggtggccttaggtgtcctcaatggcagtgatgtcatgaacatggtctctgacctcgtatgtgtggcatctggtggctgcgtagagtgaccgacacgaccaatttcggtatggttacaccctacctcattggtcagcttaagaaagcccttaggagtcctcataggcccttagggtcttccttaggataaccgatagatggcacttgcatgaacccattggataccttaggatgtcctttaagaatctgatagaaaaatctgaaagggcacctctcatagacaaacgccaacgaatccccccatagggcctctctcagccatcccaagggctctgctccccatagggcatctcaatgatcatctgagggatacgatgaggtgactcaatggtggctacatggtggtgatccttaggtggttcgttgaggtacatgatggggcctaaagggtgagctgtcaacactggggattcatacagtagtccatctgtccctatctgtatcagcaatccttaggctgctccttaggctgctccttaggtcactcccagggtgatcatgtgacgcctctccttagggccatccttagggctcctataaggtgcctgtagaccctgctccttaggatggccttgagttgcctatatagaggcgatgcgtagcctatgagttgttacaggctgacctatacactggatgaataaacaggttgacggcgatgctcagttctatacaatgggccacatcaacaacgagacacggcctaacgggtgtctctgagttggtcgcttagcttagtagcatctgacctgcgatcatacgtgtgccaagggtcttaagggtgacgaacgatgagcgacacaagggcagaaacaaacgcttgacaacatagcaacacgctgtagaatacgccacatcaacaacgaaacacgcaacgagctacctgagcagatgtcatgagtagggtgggtcgggtgaggtcaaagtcaccagcatgggtcgcaagaagggcaacgaattggccgataaccacggcctaacgggcacccttacgctctttaacaactcggactgcaacactacgcactgagacgggatgacgtcttaactggcttgctcagaccctcggtgcgtagcagtgaaaggaaatacagcaagagggctctcgtgtatctaagcattagcacgggacgtggagagccttcgtctgtatctcttaacacacaagcaaggagcatcaccatgagtacacgcactgatcgtatacgcactgagctggctgacctcgatgcacgtattgtgaaggctgaggctgagcatcaagccgctaaggccatctttgggcgctttgagggctctgctgctcatcctatgtgggagaagctgcgcaatgaggttgactcaacgctgactcgctgccgtgtccttgaggccgtgtggcatcgcactaaggctgacctgctcgaacaactcaacgctgacaaggagtgaccatgagtcacaacacgccacgcccagacatcgacgaggctgtcattgcatgggccaagcaacacgactggtttaaatcgtggtatcgcactgaggctggccacctcgccatctgggtctatgagaacggcaaggttcatccgtggcccttcctgaactacggcgagttacgccgctgggcgggttattgagcgattcactgtagggccttccttgagggctctatgggaacaactcaacgtcacaccaacaacctgggagcaatcaccatggctaagcaacacaccgctgacatcgtaatgatcaacgataaggtctacctgacccgctattggtacatggatggccgcaagacctccacggaataccctgagcaggatggcagcgcggctcatcgtcgctactacgctcagttcgtcacacctgctgttctccgtgtcgtcaaggctcactttagcaagtcgcaatgggcactcatgggcaatgcctacctcaacggtggtgaccattacctcaatgagtcctcaaggctgcaccagtgggaccaatgcgacatcaagcagatggttggtcgcaccgtcaccgagtgtgcctacagcgatgtccctaagggcaccatgtattggtcaccgagtgagaacacctgcatcaccaaggaagccgctcggatgctcattgagtccggggagtacctgaaatgagcgttcctaccttccgccagatgctctaccgggtgatcattgaggaactcaagaaggagggcatcaagttcgggcaagatcctcacacgctctcctccagtcaatccaacacgctctatgagtgggctcaagcgatgcgctacaagccatccgctacagcctcgctgtcaccgggtcgtcagttctacgtcttcctctcccgtctggagcaagtgcaatgaaaatgaccaacgagcaaatcaaggccaagtatccggccaccgctgagcgcatcattggggaacgccgagtcctccgtaagctgctcactgcgatcactggctctggctactgcttccgcatcaacaacggcgaggacttcgagaccaaccacacctacaccgtgcaagttggcattgacgcctgcatggctactgatgaggaccatgtggtggtctaccgggttcgccctgatgacggcacctaccaacgcatcggcaagttctggctggtctatgggaactccgctgaggaggtcatagccgactacagcgccatcacatcgttcgagtccatgttctccagatggttcgacgaagccaccatagacgccgagtgattcactgatgggccttcgctgagggctcattgggaacaactcaacgcaaaccacataggagatccaaatgatccacgcaatcgctcgccagtccaaaaacatctgcctgttcgctctgttcgctaccgtgatcgccctcggggccatccatgcgaatgacgctgaggcacgaggtttctcgggtagtcggtcgagtagctccagctcatcccgctcttacagcgaccgtggggacttcactcgctgctatcggggagggttctgagatgcgtggcttctctaagcgcccctcaatgattccttcgccacccagcgactacacccagcgcgccaagctcatcaagttccgcgcctcgtgggtcgatccgaacacctacgggctcgtcaaggctaaagagctgacctttgagctgggccttgggccttgtggtcgtcacgttgtcagcctgggagttgccatcactgatgacctactgacgatcaagcagtggtcacgaagccctgagctgctcaatgagcctcaatgcgatgccaagtggaagctggagcggcaccagcgcttagagcgcacctaccggcctgctgtgaccctcaagcggcaagagctgcgagtcaccgggatgctctggtggcgcaaagaggaatgggtcgatgtcattgagaccacccatggtgatgcggtcaagcctgagggtctccttgaggactccgaagtggccgaactgcgagaccagatcagcaagtattactccgctatcacgaagtggaacgatgacctcgaactcaagacatttgtctacaagatggccgacgttcatggccggatcgaggtggttaagtaaggctggattaataaaccctcactgttgcgagacacctcagagggttcctgcctaaaagatcaccttaaagacatcttaaagatccctctgagataaaccttatagagcaattctataagacaactatatctcatagagcatcttaaagaatgatccccgagcgtcacgacttcgctgacatcgcaacatcctcattcgccttcaatcaactctccagcatctacggccccgaactggccgctgagcaactgcgcttggaacacgaagcgtacacgcttggagaggaacgctttcatcgccagatggagcgccagatggagcgcggtgagttctccaacaacatcgccgctcagccgctgctgggcactctggtccctaagatgtccgctgcgatcaccgcatggatcgaccaccaagccaacaagggtcgtggccgtaaacatgtgagcttcgccgctgcacagcaaatgaacccggacacgatggccgctgtgaccatccgctacgttctcaacatgatcgcccagcgccgtaatggtgccccaacggtgaccgagatgagcatcgtggtcggtggagccctcgaagacgaagcgcgctttggccgcatccgagtccttgaggccgaacacttcaagcgagccatcgccccggctctcgccaagcgcaacggtatgacctacaagaaggcgtacatggagcgggtcgaggagtcgatgctacagaagggcgaactggcccaaccatgggttgactggaacgtcgctgactcagatgtccgcttccacatgggcatccgaatgctggagctgttgatcgaatcgacccaactgatcgaggttcgccgtgatcacgctggggacaagaagaacgatggcgagtatgtgttcctcaaggatgaatgggctgacaagatccagaaccgggccttcgcactggccggtatcacgcctcagtaccaaccctgcatcgttccgcctaaaccgtggaagggtctgcaaggtggcggttactgggccaagggtcgcaagcctctgaccttcatccgactcaacggcaagcaagcccgagagcgctaccgggatgtcgagatgcctgcggtttaccgggcagtcaacatcgcacagtcaaccgcttgggcagtcaataagcgcgtccttgaggttgccaatgcggtgatggaatggaagaacgtacagatcaaggagttccctacaacggaacgccaagagctgccactgaaaccccacgacatcgacaccaacccagacgctctcaaggcgtggaagaaggaggccgctggggtctaccgtaaggacgccgcaagggtatcccggcgattggcctacgagttcggactggagcaagccaacaagtttgctgagtacgatgcgatctacttcccgtacaacctcgattggcgtggccgggtctacgcggtccctgccttcaaccctcagtctaacgacatgaccaaagggatcttgcaggctgcccatggggaacctgtaggcgaggagggaatcgagtggctcatgattcacggggccaacactgcgggcgtcgataaggtgccctttcctgaacgtaaacaatgggtccgagaccatgaagaacttatcttggcgattgccaacgatcccctcaacgtcaccgaatggatgtccatggactccccgttctgcttcctcgctttctgctttgaatgggctggcgttaaagctaatggcgctgcacacgtcagtgccctaccccttgcgttcgatggttcctgttctggcatccagcacttttccgcgatgcttcgagatgaacgtggtgggcgtgctgtcaacctcatcccttcggactccgttcaagacatctacaagatcgtctctgatgaagtcgagatcgctctgcaatatgacctcaagtacgggacggacgactggatcgaaactctcgtcgatgaggtcactggagagatccgcgatgttaaacgtctcggcactaagaccctcgccattgcgtggctcacttacgggatgtctcgtaaggtcaccaagcggtctgtaatgacgctggcctacgggtcgaaagcctacgggttcgctgatcaagtccgagaggacatcgtaaagaaggccatcgacaacgatgagggccacatgttcacaagccccggtgaagcgagccgctacatggctggcaaaatctgggactcggtgagtgttgttgtggtcgctgctgtggaagcaatgaactggctacagaaggccgccaagctgctggcctctgaggtcaagtgcaagaagaccaaagagatcctcaagcctgccatgccagtctactggacgacccctgatgggttcccggtatggcagcaatacacgatcaacccaacgcgccgaatcgacctcatgttcctcggggacgttcgcatccaagccaccgtgatgatgcgcgacaacgggtccagcaagatcaacgcaaggaagcaagagtcgggtatctctccgaactttgttcacagccaagacggctcacaccttcgcaagacggtcgtacacggttacgacaaccacgggattcgattcttcgccctgatccacgactcgttcggcaccatccctgccaaagctggcgcgatgttccgggcagtccgagagaccatggtcgaaacctacgagaacaacaacgtgctggctgacttccgtgagcaattcatggagcaactacacgagagccaactggacaagatgcctgagcttccaaagatgggaacgctcaacatccgcgacatactcaaatccgacttcgccttcgcataaggaaaccaattatgaacgccgctcagaacttcgttaagaccaccaaacgtaccctgcgtgatgactccgagatggaagccatccgcaccaagaagggcaagcgcaacaagcccgtccgtggtggtcgcgtagagtggaccccaatctgcaccggcaacgctgcctactaattcccaaccttaggagatcccaatgcaagttatcgttaccgccacctcgtccaaagttgacgacctgatcctgatcgaaacctccaccaccatcggtgacgttacgaccaccgccaagactggctatgacgttcaagagctgatggacaaccgctttctcagtggtgaccttgagactcgcatcgaagcccttcgggtcggtgccgaggctgtgaccatccgctccgttgaggcgcacttcaagaccctgatgaacatcctcaagaagcccgctgaggtgactgacgtgagcgcggtcccttcgagccaactgcaaggcgtcaaggctgacgtgatgatcgtcgatgaggcccaggctgaacctgtgactgagccggtgaagaaaacccgcgctcctcgtaagcctaaaaccaccaccaccgaatccaactaaggggaaccccatgtccaaagtcgaagccgttatcctgaacaccaagccattccgcccaaccgactacaacgagaaggctgttgaggctgttctggatgagtcctacctgatcgctgatgtcaagaaggacggcgttcgtttgaacctgtgcgtgaacctgatcgagaccaagcatgaccacggttgggaagtcgagtggttgtcccgtgagggcaagcgcttcccggccttcgggccatctcatggtcctctggacaccgaccctcgctgggctgacttcttcaacgcgaacaaaggcgaggggatgttccctcaagggttcatgttggacgctgagctggtcctgaccgacatggatgaccgtgaggttccctgtaagaccacctcgggcaccctgcgccgtaaagaggagtcgatcccactgagccgcatccgggtctacgtcttcgacatcgtaccaatggacgttgtgctgagcggtgaggaatacgaggtcttccagtgcgtccgtaagatccacgttgagtatcaggtagccaagctcaaggaatacttcccagagatccaatggatcgtcgctgagtcctacgaggtcttctcagtggagaccatgccagtggttgagcgtgaaggcttcgacgaggagggcaacgagatcaccgtcaaactccaaccgccactctcgctggtccagctctacacctcggtgcgtgagcgcaaggaggagggtctggtggtcaaagatccgatgggcttctatcgccgctcgaagtgcaacggctggtggaagaaggtgccgagcaacaacgaggacggcaaggtggttggtctggtctggggctcgaagggtaaagccaacgagggcaaggtgatcggcttcgaggttcaacttgagtccggccatgtggtcaacgcttgcaagatcagtaaggcccagatggaggagttcaccaagaaagtgatggaccacaacggttatgacgttgaggacatcgagtcgatcatctacgggatgggcagctcattggttgacgctgagaacccgtaccaccaccacatggtccgagtgacctgcatggaacgctaccctgatgggtcgatgcgtcacccgagcttcgacgagttccgtggtatcagcgatccactcatcaaagagtaactaaacgagcctcatcgacttcggtcggtggggcttttttgtgcctgtctgaataggagaaatctatgatcaagttcctcatgatagttttcgttgtgatcaccttcgccatccttatagctggcttcgagcctgaccggactcccgtggagcgcctctacgacgacgaggattaataaaccctcactgttgcgagacacccaaccaaccaccgaaaggagatccaaacgatgcccgttaaagaccgttcgttcgcctaccgtctgcaccaatcgaacatcgaccgtcaacgcaactgcgcccggttcaacatccgtccacctaaaccaccagcgccaaaggccgacttctggcagcgcaccaagacgttcttcaagaacctctggaccaagatcaaggagatcgtcaatgactgacatcatcgccctgacttctgagcgtggtcgtagcggcaaagacaccctgtgcgagcttctgatgatcgagggctaccgggtctaccgggtcgcctttggggatgtcctcaagaagcaatgcagccacatgctggccctcgacgaatgccaacgcatcgttatggagagccacatgcacaccgacttcaaggacgctcagttcgaggagttggcaatcgaggcgatccctgagagcgagtacaaggactggctgctgaatgagccccagatcctcgacattgagatcccaaggacacctcgctggcacctccagcaatacggcaccggctttcgtcgcaactacaagcagaacccggacgtgtggctgctggagggtctcaaggagatcaagaaggctcccaaggatgccctcgtggtcgtcactgacatgcgtcaagccaacgaatatgcagcactgagcatccgccaagcgcacctcgttcgtctctcccgagactgggcgatccctgctgtggatgaccagccgctccacgctactgacattgaactgcgtgacttccaaatggacgccgttgtggtgaacaagtggggccacgcctcggagatgatcgaccaactcagaactcaaggagtaattactcatgcctaagcaagaccagaaaatgaagaagttcctcgtcaccgtggagtaccgcaaggaggtccaagaggtgccaatgtatggccgcaccattgaggaagcgctcgaagctgctgaccttgagtacggtgaagacaacgttcggcgcatccgcccggaggtcactcaatgaacctggcccaaggcaacacccgctcgatgcctgacggcttcctccacatccagaacttcaccgtgaccaagcacgcggggatggctggcgtggtctacatccacatccttgacgcccatcaacgtcagttggtcgaagggctgctcattgagcgcgccatcgtgaccgctgagctggaaggcaaggagctgcaccacttcaaacacggctgctggcggttctccaaggagttcctcaagaacaacttccgtgaggtcgtccatgcgatgaccaaggtgacgctgatcccggtcattgagaccttcaagcagaccctgttcaccgagcgtgaatccctctcgtactgaataaaccctcactgttgcgagacacctaccttcccactttcataggagataatcccgatggcaaaatccaccaagcagttcttctttactccgaaaggcgtagctgaaccttactgctcgatccaaaagccggactacggcaacccagagaaaggcttcggcaaccctcgtggcgtctataaggtcaacctgaccgtgagccgtgctgatgcccagccaatcatcgaccgcatcgttcggatgcaagaacaaagctacgcggcaatctgcgaggacttcgagaagaaccgcgcatcgctgaccgccaagctggcccgtggcaagaaactgctggaaccctatgagggcgacctgccgttcttcgagaacgacgatggcaccgtgacgttcaagttctccagctacgcctcgtaccaagacaaggaaaccaaagagaccaagccgctgaccttgaaggtcgtggacgccaagggcaagcgcatcgacgctgttcctgcgatctctggtggttccgagttgaaggttcgcttctccatgttcgcctacaccttcggtgccgttgtcggtgcctcggtcaagctgcaactggatagcgtgatgctgatcaaactggtcgagtacgctgctggcaatgacgactgggctgatgaaaccgaagaaggctacgtcgctccagagcgtgaagaaagctgggacgatcacgaagaccaaggccatgctggcgaggtcattcctgacgctgcctcggacttctgatggctggctacgctggcccgaagggcgctcgtacaggcgcttttcgatccggccttgaagaccgcaacgcggctcacatggacaagctcggagtccctttcgacttcgagcagtaccacattaagtacgtcgttccggcccgtgaggccaagtacacacctgacttcgttctgcgtaacgggatcatcgtggagaccaaagggatatgggaagtggacgaccggaaaaagcatctgctgatccgtgagcaataccctgaccttgacatccgtctggtcttctcgaactccaagagcaagatctataagggctccccaacgagctacgccgacttctgcacgaagcacgggatcatgttcgcagacaaactcattcctaaagcatggctacaggagaaacgtaaggagatcccagcggggatactccatccgaaaggaggtaaatgatgccaaaggctgctttcaagaaacgcccaagtacgaccctgctcgtggtccattgcgcggcaaccaaaccgaccatggacatcggcgttcgagagatccgccagtggcatgttcaacaaggctggctggacgttggctatcacttcgtcattcgccgtaacggcactgtcgaggatggtcgccctcatgacgtcattgggtcacacgccaagggctacaactccacctcgctgggcatctgcctcgttggtgggatcaacgccaagggcgccccagagaacaacttcacgcctgagcaattcaactcgctcaagctgctgctgatcgctcacaagcgcacctatccgcaagccaagatcgtgggtcaccgcgacctcgactcgggtaaagcctgcccgtccttcgacgtggccgagtggctgaaaactcaagggatttaataaaccctcactgttgcgacacggcctcactgacttcggttggtggggctttgttgtttttaaacgttgactttaggaggtcattatgaatcgttccttactgcaaggtgggttcgacctttgtgagcatctcattgaccgtggcatcggcgcgattatcgctggtggctgtgcccgtgacctgttcttctcggttgagcctaaagacatcgacatcatttgcgcgggcaccgacccggagactgtttccagagcgctcgatgaaggtggctacacctaccacaagttccccaagtaccacaccggctccgactctgatcggctgcaaggtgtctggaaaatcgaaggctgcgagatcgacgtgattctttacgaggtcgagtgtgtcaccgaggccatccagaagttcgactacaacctcaatcagttcgccatctcgggcatccaaaggggcatcgaaggggcaaccattcgcttcatgggcgctcacgcttggaccaatctggttcaactgcgagaggacgctcgtggctcccgtgctgaaaagatggaagccaagtggctggacctgattcacaaggcaccgatgcgtgatggtcggtacgtcgatgagatcgaggtggccgatgtcgtcgcatgaggaacgcgaagaaagcgttttccttgcgcatatcccgtgtgaggaatgtgggtcgtcggatgcaaactcgctgttctctgatggtcaccaatactgctttgcgtgtccccctgagactgcctacaaggcacccgatgggaaggagcgtggggagttcacaccgaggctcaaagctgacggcacgctctcgatgggcgaggctggaggctacttctcggcgctccctaagaggttcctacaggagccaatctgccgcctctatggttactggatcggcaaggcgttctcgcctcatgagggcaaggaagtcccggtacagatagccaactactacgacaccgagggcaacctcaagtcgcagaagtgccgtcaagccaacaaggacttcttcaccaagggcaagcacgacaaggacgctctgttcggtcggcacctgtggaacggtggtcgcaagatcgtcgtcaccgagggtgagatcgactgcctgacagtggcccagatccaaggtggtaagtatccggtcgtgtccattgggcatggctcgaaggctgccaaggcgacctgtgcggccaactacgcctacttcgatcagttcgacgagatcatcctaatgttcgacatggatgagcccggacggattgcctcaagggaagccgctgaggttctcccaccgggcaaggtcaagatcgcagtcctgcctttcaaagacccgaacgagtgcctccagaactcccaggccaaagctgtgatggacgccatgtggaacgctgccccattcgtaccggatggagtggtctctgcgaagtccctcaaggcccgcatcaaggagaagaaagcggtcccgagttatccactcgtggctccttacgaactccgcaagatgaccaaggacatccgagaaggtgaggtcgttctggtcacctctgggtccggctcaggcaagtccaccttcgttcgccagaacacttacaacctgttcaatgactgcgggattcccgtaggcgtggcgatgctggaggaggccgttgaggaaaccgtacaggacatcgtagggcttcacatggggtcacgagttcgtcagaaccccgatgagaccaccgaggagatgttcgacaaggcgttcgatgagatcttcgagagcgacaagctgcacctctacgacgccttcgctgagtccgctgaggatcgcctattggcacgactggcgtacatggtcgaagtcaacggttgcaaggtgatcgtactggaccacatctcaatcgtggtctctgcgatggacggtgagaacgatgaacgcaagatgatcgaccggctcatgaccaagctcaagagcttcgccaagaccaagaacgttgtcgtcttcgttatctgtcacttgaagaacccggacaaaggcaaacctcatgaggaaggccgacctgtcaccgctaccgacctgcgtgggtccggtggtctgcgccaactgagcgacaccatcatcgctgtagagcgaaaccaacaaggtgccaaccctaacctcatcctgttccgactcctcaagtgtcgattcacgggcgagacgggcgtggctggctacatggaatacgacaagcggactggtcgattggtagcgaagcctgagggctggcgacctgaccaagatgcaactgacgccgctgatgctgcatgggcagaccagcaagaacccgacttttaaaggagaaccaaaccatgaagaacttcgacatcgtaactttcctgatcactctggctggccgcattcaagagaagcgtcacgctcgtttggtggctcgtgaagcgtccttgaaggctgccatcacggctgctcaaaacgccttgcaaaccaccgtcgatcaacgtgtgcaagccaagtggaaacacgaagacatcaagcgcgtgagctgatccaagggcctctctttgaggggccttttagtgagttcacacatcaatgctacaggggggaatacacatgaatggttctgacgttcgcaagttcatcaaacgtggtgagcaggccgctgaggtactcgaaaagctgggctactcgtacatcgagaaggctgggcatcacccacattgggaagccccagtaaacccgatggacccaatccttgaggcgctcaacaagatgatcgctgagaaggttgacgctgacatcaaggcccgcattaaggacgacccaaggggtccgaactggcacctcgttgcaccaatggtcggcaaggacttccgtgttcaatgcgccaagatcccggccaatagccaactggcgtcattcgcctttggtcctcacttcgctggcaaggtgttccgcgccatcgagatccgctatcaccgctccgaggagtacaccggctatgccgtgctgttccacttcaacgtgcgcccgtatcgcccagaagtcgtatggctgcctttgagcgctgtcgccttctccaactaaggagggcctcatgctcatctctgacatcgaaacgaacgggctctatgagtccgtcactcggttccactgcgccaccattcaggactatttcaccgggcaatatgttcggtacaacgagtccaccttcaaggagtacatcgctgcccttgaggccgaagctgccaagcctgacggtatgatcgttgggcacaacttcatcaagtacgacatcccggtcctcgacaagctcaagcgtctctacttcggtaagcgtttgaacatcccaaggaagcgcgtgatggacaccctcgtgatgacccgtctggtttactccaacgttggtgatcgtgactctggtctcatgcgttcgggcatccttcccggcaagatgtttggctctcactcccttgaggcgtggggctatcgtctgggcgagatgaagggtgaatacaagcacgacttcaaggtccagcttgagaacgatggtggcgtctacgttgacggtatggagtggctggaatgctccgagtccatggaggactactgtgagcaggacgttcgggttacctcgaagttgttccgcaagatcatctccgacctgcactacttcaacgatcaaggtgaggccattgaggccatccgattggaacatgcggctgcgtggtcgctggcccagatggaacgcaatggcttccccttcgacatcgagggagctgagaagctctattgcgaactggctggtcgtcgtagcgatctcctcgtggaactcatccagaccttcgggtcgtggtggtctccgaaaggtggtaagtcgcagttcctcaacccgaagactggtgcaccaatcgactactggtctgatggccgtgtcatgccgaaggtggtctatcccaagatcggtggcgtgttcctcaagagcggcaagaaggacacccgagagaccttcgagggctgcccttacacgccaatcgaactggtcacgttcaaccccggatctcgggcgcaccttgagaaagtcctccgtgatgctggctgggttccgaccgagctgaccaacacgggcgctgccaagatggacgatgagacccttgagttcgtccgtgtggctgaccctaagaagcaagcgtgcatcaaccttgtgcgtgagttcatggaggtcaccaaggtcattgggatgctctctgagggcgacaaagcgtggctgcgatacgtccgtgaggatggctgcatccatggctcagtgaaccccaacggggctgtaacaggccgtgcgacccatagccacccgaacatgggccaagtgcccagcgccaagaagaagtacggacctgcgtgccgtgcgctctttggggcggtctttgcgaggaagctcaagaagggctgggagaacgccgtccagttagggactgacgcctctggccttgagctgcgctgtctgggtcacttcggtgcgccattcgacgaaggctcgtatgccgagaccgtgttgaacggtgacatccactgggtaaatgcgctcgctgctggcatcgctcctcctggcctaatccgtgacaaagagaaccatgaacatgacgcctaccgggacaccgcgaagacgttcatctatgcgttcctctatggcgctggtgatggtctcgttgggtcgttcgttggtggtggcaagaaggaaggtaaggcactcaagaaggcgttcatggagaacaccccggccatctctggcctgaggggagcccttgaggagcaactgatctccgagcagaagtacaacaacgtcaccaagaagtacgacatcaaatggaagcgccgttggatcaaaggtctcgatggccgaaagatccatgtccgctcccctcactccgcgctcaactcgctgctccagtccgctggtgcgcttgtgtgcaagaagtgggttgttgaggtggaacgcattctcgtcgaggagcatggccttgttcatggctggtacgacgacgatggcaaccccggtgacttctgcttcatggcatgggttcacgacgaactccagattgcctgccgcaaccaagaaatcgctgagctggtcgcaaaggtctccaacgaggccatccgactggtaggcgaatcattcaaattccgctgcccactggctaccgattccaagatcggcccaacgtggcgcgagtgtcactaaggagatccttatgagcatgactctgaaactgaacgtgtccttcccgatgaccatcgtggtaaagaccgagaccctgaaagccttcgacgaaacccgtgaggaggcccgtaagatccccgctgaggagatcgacaagctcaagggtgagaccaagttccgcgctgagctgttccgtggtgaccgtaccactgagcaagtgatggagctgatctaccgtgctggcatccgtgagctgatccgcaaggaactggtcgaggaaatcaccggcaacgaatcgaccgcccgactgggctgcatcaaggtgacctatgaggccccacctaagcgttcctgtcagggctgcattgagaccaactgcgtgctggccgagcggaacactaacgctggctgcgacaacaagcgcactggcatccgtgagcccggtcctcgttggactgagacggtatgaatgagtacctaaaggttctctgggaaatcaaaaagcaagcgaggtcgtatcaaagcgacttcgttcgttcccgcattgcgctggtcaacgaggcttcatcccgaggccacatctcgtgcctatcaactgccggtaagaacatgggtctctggaccttgaccacttccggccaagacttcctcgcacaatatggaggtgccgtttgagtaaactgaaagtgggcctcgcccatgatatggactacctcatcttctcagcgatgtccgctgctgaggaggagcaggactggggcgaagacgtatggaccctgttctgcgatcacaagaaagcccgtgacattctgttcggcaccatcaagaccatcaaggcgaacatcgccgcacaactcaagcgcaagttcaagctcactgaggacaagtacgagtttgttgacatctgcatcctgagcggtgacgacaactggcgtaaggatgtccttgagacctataaggccaaccgtaagggtaagcgtaagcctgtgggctaccgcaagttctgcgatgagatcatggcgcactacggtgacatgtccctcaagtggcacggtgtcgaaggtgacgatgtttgtggcgtcctgatgactgacccgagcatcgttaagtgtgaccgtgtgatcggcgtgagctgtgacaaagacttcaacacggtgccgggatacttcttctggctgaccgagcaggaactcatcaagaacgatgaggcaacctcggacctgcaccacttctatcagaccctcaagggcgacaccacggatggttatggtggcgtgccgggagtcggtggcgagttcgatggtggcctgatggattggctccagtctccgaagttctacttccaagacgtgaaggtcatgaagtccggcaaacgtaaaggcgaggaggtcccgttctggacttcccgtgagcctgatggcgagtccctctgggactgcatggtgtcactcgctgccaagcagggaatgactgaggaggagctggtggtccaagcccaagtggctcgcatctgccgcgcttcggacttcgatatggagaccatgaagcccatcctctggcgtccctaatttaccctcactattgcgagagggagcccagtgttcccttaaggagtcctattgctaaagcagatccaacactacatccaaaacccggatgacatccctgacatctctcccgcatctgccgactatctcaacgtccgtctcaacgcttcctatctgatctccactggtgctgtcgatgatctccgcaaagcggggttctccgagcagtacatcatgggcttcattgacggatgccatggggcgactgagatcgtggagctgatgcaggaggctcaactaaacaaggaggaatgaccatgtgttttaaatccaaggtcaagaccccaaagaccaaccctgatgctgtgaaagcgcctgagccggttctcattgaggaacctaaaggcgtggacttcggctcaaccgaggacgatgacacctccagcgatgagggtctcgatggtctcaaggtcaagaagtccgatgtttccacaaaggacactggcgatggttcgtctgatgctgtcgctgctgatacaggcaccgggaccatcaagaagtccaagcctgctgcatccatcaagaaggctctcaagaaggtcactaagtgaacctggctgcgcatgtccagaaggaaggtcacccggcctgcttccgtgaggtgctgagcgacatccttgaggaactcactgagctgacgtggggcgggtccagagtcgaatgctacgagcgcatctgccggtcaaccgaagaacttgacgaacgcatagagatcaccgtgagagaccctcaagggaagctcgtggggttcgctgtggtcgtcaatgatgaggatgaccatgtaggtgagtgtctcggaacgcaatggcactgggttcacccggaccaccgtggccccgtgggtcgaatgatccttcgggcaatcgttaggctggcctccaatgctggctacaagaccgtggcgtacacgaagcgcttaggcgtgggtcgctacgagatcaattacaaacaactgaaggagaacatccatgggcaagaaaattaagaaggtcgtcaagaaggtcaccaaggctgtcgttaaagtcgctgacccggctggcgtgatcaaggaagcaactggcggtaacgatgcgcctgctcaggtagtcgaggcacctgccgcaccgacccctgtggctgcccctgcgcctgtctcagcggctgtcgttgaggccccgaaggataccactgagggctccgatgatgctgacaccgaggctgccaagaaggctgcccgtgcgcgtggtaaacgtggtctgagcgtggctcgttccgctggtactggcatcaacatctaaccaaggaggtgacccgtggcgactacaactcgcaccgggctcgctgaggagggcgcaaaggctgtttacgaacggctgaaaaacgaccgagttccctacgagacccgtgctgaaaactgcgcgaaggtcaccatcccctcgctgttccctaaagactccgacaacgcctctactgactactccactccgtggcaagcagtgggcgctcgtgggctcaacaacctgtctgccaaggtcatgctggctctattcccgctgcaaagctggatgaagctcaaggtgtccgagtggcaagcgaagcaactggtctccgacccttcgcaactggctgtcgtggaacaaggcttgggcatggttgagcgaatcctgatgtcctacatggaagccaactcgtaccgtgtgacgctctttgagctgatccgtcagttggcccttgcagggtccgctctgatctacctgccaccaccagacgcatcgtcgtctgcgtacaacccgatgaagctctacacgctccacaaccatgtggtccagcgtgatgccttcgggaacgtcttacagatcgtcaccgtggataaggtcgcctttgcggctctccctgaggacgttcgcaactctcttggcgctgatggcgagcgcaagcccgaccaagagatcgaggtctacacccatgtttatctggacgatgagtctggtgagttcgcttcttatcaggaagtggatggtgtcgaagtcgatgggtccgaaggtcagtatcctctggatgcctgcccgtggatcgctgtgcgctggaccaaacgtgatggcgagcattatggccgctctcatgtcgaggaatacctcggtgacctgaactcccttgagtctctccatgaggccatgatcaagttctcgatggtcgcctcgaaggtgatcggactggtgaaccctaacggtgtcactcaggttcgtcgtttggtgaaggctcagactggtgactttgttgccggtaagaagtccgacatcgagttcctccagttggagaagaccgctgacttcacagtcgctaagtctgtcgctgatgccattgagcaacgcctctcctacgtcttcatgttgaactctgcggtacaacgcaagggcgaacgtgtgactgccgaggagatccgctatgtggcgagtgaacttgaggacacccttgggggcgtctattcgattctctctcaggaactccaactcccaatcgtccgcatcctgttgaaccaactacaggcaacctcgcagatcccagacatgccgaaggaggccgttgagccgactgtcagcactggtgtcgaggcactgggtcgtggtcaggacttggacaagctcaatcagttcttgagcgcaatggctaacgtgagtcagctacaggctgatccagacctcaacatgagcaacatcaagttgagactggcgaacgctataggcatcgacacgtccggtctgctgctcactgaggccgagaaggctcagctccaatcccaagagatgctcaagcaaggtggcctcaacgctgctgctggcatcggtcagggtctcgctcaacaagcgaccgcaagtccagaggccatccaaggcgctatggaaactacgggcatcgaagcggccccgatttaataaaccctcactattgcgagacacacgttctgccaagcaagtacatctgggaaacctcggatagtgcccgaggcgtgtgtctctccattttctaaaggagacccaatgagcaacgaatcccaagctgacgtctatgcacacttcggcgtgaatagcgctgtgatgaccactaccaacatcaccgagcatgagcaagcgatgctggcaatgcccgtgtctgttcgtgatggcgatgactccatcgagatgcactacgaggacgccgaagaaggctccaacgagctgcaactggataccggcgaggacaactctcaagagctggaattgacgaacgaggagggcactgacgaaggtgctgactccgatgagttcgttcctctgggcgaacctgatgctgacctgatcgaagcctctgaggccgtcgatgagtacgctgatggcttcactcagatgcgcgctcaagcgatcaaagcgggcctgccacaagaggtcgctgaccagatcgaggccgagtatgaagctgacaacaaactctctgaggcgtccttaaaggcgctggagaaggttggctacagccgtggcttcgtgaagtcgtttatcagcggtcaagaagcactggctcaaacctatgtggcccagatccagcaatacgctggcggtcccgagaagttcaaagccatcgtggctcacatgacggccaactctcctgatgctgttgaagcattggagcgagccatccagaaccaagaccttgcgtccatcaagacgctgatcaatctgggcatggcgagccgcaccaagaagttcggcaagacaccggaacgtagcgtcactaagcgcgcccctgcaagtggtcctaaacaggcccctcagggtccacaaggctatgcgtctcaggccgagatggtaaaggcgatgggagactcccgttacgctaccgacccatcttatcgtgcccaagtcgaagcccgagtgctgcgcaccaactggtaattaataaaccctcactattgcgagagatacctatccgattcccttcggaggatctcttgcgcccttaagaatttcacaaaggagaactaatacatggcgaacatgaatggcggtcaacaactcggcgcgaaccaaggtaaaggtcagaaccctgctgacaaactggcgaacttccttaagctgttcggtggcgaagtcctgacggctttcgtccgtcgctccgtgaccatggacaagcatatggttcgtaccatccagaatggtaagtccgcttcgttccctgttatgggtcgtaccaaaggttactacctcgctgctggtgagaacctggacgacaagcgtaaagacatcaagcactccgagaaagtgatccagatcgacggtctgttgacctcggacgttctgatctacgacatcgaagacgcgatgaaccactacgatgtccgtgctgaatactcggcacaactgggcgaagctctggctctggccgctgacggtgctgtactggccgagatggcgaacctgtgcaacctgcctgccgctaccaacgagaacatcgctggtctgggcactgccgttgttctgaacatcggtgctgctgctgacctcgttgacgttgaggctcgtggtaaagcgatcctgaaaggtctgactctggcccgtggccgcttcaccaagaactacgtccctgctggcgaccgtcgcttcttcacttcccctgacgactacagcgcgatcctgtccgctctgatgccgaacgctgccaactactcggcactgatcgacccagagaccggcaacatccgcaacgtgatgggctgggaagttatcgaagtcccacatctggtcgctggcggtgctggtgatgacgacctcggcactaaccagaagcacgccttcccggccactgctgctggcgatgtcaaggtagctcagaacaacgtgatcggcttgctggttcaccgttcggctgtcggcaccgtgaagctgaaagacatggcgctggaacgcgctcgtcgtcctgagtaccaagctgaccagatcatcggcaagtacgcgatgggtcacggtggcctgcgtcctgaggctgctggtgcgctggtcttcaccccggcctaaagccaactaaccccttggggctcctaaccgggctccttggggttttttttcattcaacgaaaggagatcaacatggcctatgaatcggtcctcgactctgatgacgaactcgatgctgtcaatgacatgctcgctgccatcggtgagtcccctgtaagttccctcgaaggtgaccctaacgctgacgtagcgaactgccgtcgcattctcgccaaggtcaaccgtgagatccaagcgaagggatggacgttcaacattgaggagggcgcgatccttctcccggacgccttctcgaagctcatcgagtacctgcctgactacctgcgcatgaccacctcaggcggcaccctgtacatcaaccgtggtggcttcgtttacgaccgcaccgcgaagactgatgtctttgaaaacccaatcaccgtggacctgatccgcctcaagcaactctctgagatgcccgagtgtttccgctcgtacatcgtcgctaagtcctctcgtcgattccaaacccggttcttcggtgctggtgagatcgagggctccttgcaggaacaagaggctgaggcttgggcgtccatccaagagtacgagctggacttcggtggcttcaacatgatcacaggcgatgcgttcgtcggtggtatcaccaaccgctaaggagggcctatgggactcgtttcgcaaagcgtcaagaacctcaaaggaggtatctcgcagcaaccggacatcttgcgtttctccaaccaaggtgccatgcaaatcaatggttggtcctcggagactcagggtctacagaagcgaccaccgaccaagatcatcaagcgtctgtacagcactggcgcactgggcgtgaagcctctggtccacatgatcaaccgggactccaccgagcaatacttcgtgtcgttcttcgggtccggccttacggttcacgacttagctggcaatgagtatctggtccgtggttacaacggctacgccaactgtgcgaaccctcgggatgacctgaggctgatcaccgtggctgactacaccttcgtgaccaaccgtaagacggtcactcagttgggcggtacgctgactggcgctgggcaacctaacgtgaccactcgggggcttgtgaacatccgtggtgggcagtatggccggaccatgcagatcctcatcaacgggggcgtctacgggaacatccagatgcctaacggttccgctgagaaggtgcctgctgggcagccttacgctggtatgaaccaagtggacatgacggacgccaactggatcgcctcaacgatggccgctcagatcaacactgcgctcaacgcctcgggctggtcggcaacctctggccccggctgggtcatgatcaccgctcccggccccggtgggtttgtttcgctacagaccaaggatggctacggtgaccagctcatgaacggcttcatctaccaagtccagacgttcaacaagttgcccgctcaggcccctgatggatacctcgtggaagtcactggcgagtccgctcgcacaggcgacaactactgggtccaatacagcctcgctggtaaggtctggaaggaagtggcgaagccggggatcatcgctgggttcaatagtgcgaccatgcctcacgccctcatccgggccgctgatggcaactttgattggaccccgctgacatgggatacgcgccagtgtggtgatgatggaaccaacccaatgccgtcattcattggtgatcggatcaatgacatcttcttcttccgtaaccgtctgggcttcattgcaggcgagaacgtgatcatgtcgaggaccgctaaatacttcaacttcttcccggcctccgtgagcgctcttagcgatgacgacccgattgacgtagcgatctcgcacaaccgtgtgagcatcttgaagtatgccgttccgttcgctgagcaattgctgttgtggtcggaccaagcccagttcgtattgtcgtccgctggggttctctcctcgaagaccattgagttggacttgacgactgagttcgatgtctctgatggtgcccgtccattcggtattggtcgcggggtttacttcgctgcacctcgggcctcctacacgtccctcaagcgctactacgcgatccaagacgtgagcaacgtgaagtccgctgaggatgtctccgcacacgttccgagctacctgccaaacaccgtgttcaatctggcggggtcaggaaccgagaacttcgtgtcgatgatcagtaacgggcaaccgggcaacctgtacatctacaagttcctgtacctcgacgagatcctccagcaacaatcgttctcccactggaacttcgggaccaacgttaagatcctcgctgcgtactcgattggctcctacatgtacctcatgttggatcgccctgaggggatcatgatggagcgcattgagttcactcagtccaccatcgacatcgctcaggagccctaccggacctacatggaccagaagaagctcatccagatcggtgcctatgacatcgacctccaccgtagcttcgtgagcatcgaatccattctcggtggcctgccatcgggcgactccgtgttctacacgattgaccagcaaggcgtgatgcagcgacatgaaggtccatggccttcgggttctggcttgtcctttccgggcaaccgggctggtgagtatgtggtcttcggtcgtgagtacgagttccaatatgagttctccaagttcctcatcaagcagaccgctgacgatggctccacctccactgaggacatcggtcggctccagcttcggagagcatggttgaactatgagaactctggcgcgtttgaggtcaacgtcaacaacggctccactcagtacgtctacccgatgtctggtggtcgcctcgggactcaaacgttcctcggtgagctggctctggggaccgggcagttcaagttccctgtcaccggcaacgcccaggcacaacgagtgacgatcagttctgcaaaccctaacccactcaacatcatcggatgcggatgggaaggtaactacattcgccgttctggcggtatctaattgactggcatggtgggggtttatttaccctcactattgccctatgggggatctttatgattttacagaaagcacaacgctggcacctcgaagctgctgcacgagacctcagtcccggtgacctccaagagttccactcccacacggctgggcgcgatccacgagacaccatcccgaactgcctcgatgacacctcaatggtgatcactaagggcgctctggtggtggctgtaggtgggtccaaagattgcctctggtttgtgactaccaacgtggtggacctgctgaccaaggctgaacgtatggagttctatcggatgcttaaagggcatctgagcgtactcaggctgcaaggccatcaatccctgaccaacttcgtgtcagtggacaatcacgcccacatccgtctcctcaacgctctcggtgcgaccttcgcccgtgaacaccacatgagtcctgccggatgtcggttccgtcaattctggctataggaggtcaccatgtgtgaaccagtaagcatcggcatggctgctgttgcggtcgtcggtggggctatggctgccaaggacaaggccaagggtgagggtaacgctgaggatgctcaacgtcgcaccgcccgagagcaagtcaagcagaccaacatggctaacgccaacctgcaactgactgcccaagaccgccaagaggaggcccgagcgcaactcgctgaggtcaacatgcaggcgctcaagaacaaaggaacggtggctgctgccatcggtgagtcaatgctttcgggcaactccatcaagcgtattgcgaactcagtggatgtcgaggccagtcaacaaaagatggcgatcaccgacaactacaagcgcgactattcgtcgatctttgcgaaccagattgccaacgtcgagaacaccaagtcggccctcaaaggtcaggcccaagtgatcaagaccagtggtctgagtcatgcccttgggatcgtctctgcgggggccaatggctacgccgctgggtcgtcattaaaaggtcagatgaacgccaacaaggcaactggacaatccaacggtacagctaaaggaggaacttaatggctaatgaaattgcacgagctttagactcggcccaaatgggcggtaaggaacgccttaagggctccactgcgaccgtccagttccaagcctctcagcaacgcgctgacgtgggcaacaatggcttcgctgactccatggcgagcttcgtgaaggccggggcgaatgcctatggcacctacgctcaggacaaggcgaagaacgctcaggctgagtcggacaagatcatccggtcgatgtccctccagcaacgccgtgaggctatcgcagcgggaaccctgcacctacaggatgaccctgacgtgatgaacgtcctgcgtcacgacactggccggacggctgcctttgaggtggagtccgagatccagaacaagctcgcctctggtgagttcgacaaccaatcccgtgaggaactggatgagtatcgccggacccgtctggagatggtctctcagtcctacgctcaggaagcgggtattgaccctaacgatcctgactaccagcgtggctttaacgccgacatcgtgaagcgtaatgcgggcctattcgacttgcatgaccagcgacgttcccagcgctacattgctcagactgtggtcaacactcgtggcgacactggtggtcttctggatgaccctgagttcatgcgtggtccgggctctggcatcgagatggctgcctacttcaaatcgaaggcgtcctctggggcaatcccaacggaccaagcgctcctcgattccgtcaacctcgtgatcaacgatgcggtccagaaggaccacggatcgaccttcctcaagaacttccgagatcagacgatcaccgtgatggggattgagcagaaggtcggtgacgtgatcggtcaggagaaatacgacaacctgatcgccaagtccgctgaggccacctacaagcgcaaccaaccaaagttcgagaagttccaactggatctcgcttcggctgaggctcaggctgacccggctcgtggttgggacatgatcaatcggatcgaggccgagaataagtggattcaggatggtgatggcttcactcagcaaaagcaggcggtcaccagtaccaagctcgccatgctggcaaagatgaaggcccacactcaggctacccttaaggcaaccgaggaggcgatgcagacggacaaccgcttgcaggccatcgacgaccgctacaaggctcgccgtaatggtgccctattggggaccgctaagcaggacatgcctgtcgatgccaacactggagagttcaaggagtccgactgggcgacctacgctcaaaagaagctggctcagatcgaggccatggacatccctgtggagcagaaggatcttgagcgcggtcagctcctcaaggacgaccacgagaatggtcctttccgtcgaggcttccaaacgctgatcgacgatgcagccaaggaatggcaaggcgctgttcaattgggcgaactcggggactccccaaagatcgaccaactggcacgggtctatgcccagcaaccggaactcattgcgtcactctatcctgagcgcgctggcttcatcgaaaagatgaaccagatgaagcacgttgggattaacccatcggtcctcattgcggctgacgtgaagaactccaagctgaccaaggaggagatgatccaacggaacatccaatgggacgccctcaagagcgaccctaagaacaaagacctctcagcgattccgaacgacatggacaccatggctcgttctctctatgacgccttcaacgctgcaactggcgaccctacggctgcctccaagttgctctccaactggctctcgaagaacaccgttagcttccaagctggcgatgacgacgaggatgtccagaccggctaccaagggatgatcaacaagaaggatctcatggccgacccgaacgacgttaactcgtgggagcagggtaaggccatcgttgaggagaccgttaagggcatcaaggctgctgacccgtactgggctgactcgcctgtgaccatcaccgcttcccgcactggtgacatcaagatcgccaccttgactggtgaggtcgtgaccatcaagaagcaatccctccagctcatctacagcgctcgccgtcaggcggaactggaagctcagaaggccaacaaggctgctgagtacgatgaggacgtgaaggacgcacaacgcaatcaaggtctctacaaagactttatccgagggggtcgtggccctctctaatccaatttaggaggaacacatggctaagaaaacctacgctgatgtcaaggccgctggcacgccttacgatggtttgattcgtgaggctgctgatgccaatggcgtgagctatgactacctgcacaaaaagatcttcaacgagtccagcttcaaccctcaagctcagtcaccgactgggcctcgggggctgggtcagttcactcgtgccactggtaaggcgtatggtctcgttacagacgaggacttcttcgaccctgccaagtccatcaatgcgtccgctcgccacactgcggacctcctcaagacctacaaaggggactacctaaaggctgcccttgcgtacaaccaagggaatggccgcttgggcgctccccagttgcaagctctggatcgtggtgacttctccaagatcgcccctgagggtcgtcagtacatggcgaaccttctggacgtggctggtgactccccgtcccgcaagtggttcgagggtccagatgccccaaagctaaccgctgagttccaagaggctacccaagggatctcagcaacaccatccgttgaacaaggtagcctcggtggaaacattgggatgaacatcgggggctccactgcgcctgcccaagagaagtcgttccgccaaatggagatcgagcagaacggcccagagaagggcgcatggtacggctcctctgaggccatgttggctgccttgaagacctcgcttcccggccagatctaccggaacatcaccgtcgaggatcatgaccctttggagtggatgcaggacacgggcgaccgtgagtggtccaaggaggactacgaccacatccgtaatgaaggtgtcgattcgcaatacttcgacttcattggtgactacacccggtacgacaagcgcaagctgcctgaggccatcgctctcgccaaagagaacatggctcacgacaagaccatcacatccgctggatggggcggtcaactggctgctggtggcgttctcgctgctactgatccactgacctacgtccctgttccgggcaccgctctgcgcacctttggtggccgtgtgttggctcaggggacgttctcctctggtgccgctgtggctggtgagggtatccgtgaggcgaccactgggatcgaaggtcactacgctaccgctgctgtaggtggtgctgtgatcggtggcaccatggctgctgtcttggacaagtggattgccaagtcactcgttaagcctgggcgagaagacatgagcgatgaggaactcgaaaaggttcttgctcgccacggtgaggctggcctccagtccaacgatgtcaaagtcgatgaggacatgttggcctccgctcgcccctctaaggttgacgatgagatggacgatgagtacctcgaaaagatcctcgggatgcacggtgagcgatcccacaaacaagagggtcgaatggaagtctctgacgacaccgttgagggcatccttgcgaggcaccgagagtcgagccaaccgaacgagttcatgggtccaaccatccgcatcaatgcccgtgagcaagctcgtttggctggtgctgacgaccctaccgttatggcatggaagtccgatgagacccctgatgaagccttcgggattcagtacatggatcacccaaaggaaccgggcgctgtgcgtctgcctgatggttcgatcctctcggccagcaacccgctgaaccccaagctcatcaaagcgatggcctctctggagcctgagcgagccgctgctgggttcaagttcggcggactgactgagattggcctgatgctgctgcgtagcgaggacgaggagctgagaggtattggcgctcagttgttccgctcgcccactggtggtgtctctgggtccaacggtaagtttggcgctgtggcttctgacgtgatcgagcgtgagcgtggtcaagatcatgtggctctaaacgccatggtcgatgcccaacaagaggccatgaaggatgtctcggtgaagaccctacccggtggccgtcaggctcagcgtgagtatgtggatcgccggatcgctgaggctatcgaagaccctacagggaccaagctggctcagctcactgaggccgagaagaagtacgccaaggtagtcgaggatcactttgtccgcaaagagaactcccttgagaaccctgcgcagtacggcaacatggatgccacttcgatcatgcctcagacccgtcactctggccggtacatcccgaacatctacgatgacgccatcaagctgctcaacctccaacgcttcggcggcccggagggtttgcagaaggcaatcgttgagagctggatggcttcctatctgagccgtgctgctgtgaaaaccagagtggacaagatgatcaaggagtcgctggagaagaacggaaaggtggcaacacctgaggacatcaagaaggccgttgtcgagtacgcctacaacaaggcatacggtatcagccacacgactgacttcaaccgctcctctctgatcgacgataacctcgaaggtttggtgggtcaggatgccaacaacttcctcgaaggccgtcacctgtttgactcggacgtggctgtatcgctgagcgatgggacaaccttctcggttaacgacctgcgcatctttgacgttcctcagatcacctcctcgtacaaccgtcgagtaaatggtgacatcgggatcatggctgccactggtaaggacaccactgccctcaaggacgcgatcctcaagatcaaggccaagaatggtaacactcaggaagtggaagccttgcaggagtccatcaagctgctcactgggcgctcacgtcgagaccctgactcagcggctgcaacactggctcgtgccttgactgacgtttcgttcttcaccaagaacgcctacatgggcgctcagaacgtcactgaggtcgctgggctgatcactaagggccacactcggatgctcatgaagggagtccccttcctccgtgagatgaccacatggggctctaagatcaaacctgagcaactcaaggagatgcacgacatgatcttcggtcgggagctggatgacctcatccgtcctcgccgtgctgacatcgtgcaacgcctgcgtaaccaaggctacagcggggccacggctcagactgtgggcaccatcaagttcgccactggtgagctggctgcccgttcgcctttcacaaagttcctcactgagacctccaactacatcctcgatgctggtcggcaaggtgtccttgtagacctcgtgaaccatgcgctctctgggaagacctcgaagctgttcaatgaggatcgactgcactcgatgtcgatcaccaaggcccagttcggtgacgtgacgaatgccctcaaggagcatctcgtggctgatccaaaaggtggcttcaagatccgtgatcgggccaagttccagcaagaccctcgggtaatggacatctggcggattggtgacaaggtggccgatgagaccatcctgcgtccccacaagctgagcaacaccgatgccattgcgcagaacgcttgggtcaagctggcgatgcagttcaagaacttcgtcctgcgttcggtaaacagtcgcctcctacggggcttctataacgccaccaagaacaagcaggccatcgaccaagcccaacaagtggcgatctctatgggtctcgcctcgggcttctatgtggcccagcgctacgtccaagctcaagggatgcctaaagaggaacgccgtgacttcctgtcgcggtcactggacatgaacatgattgcttatgcagcgggctctcgtagctctcacgttggtgcccctttgggtatcgccaactttgctctggcccctctggggttcgatgctgctgctgctgtgcggacctctgttctgcctcgtggtcctcagtacaccgaacggaaccgggctgtgaaatattccccgctccgctcctcgggcatccaagacccgctctcgaagttcgctgagcaagtacctggcctcggagtcctcgggtcgatctatcagattggcaatggcaccgctggcgtgttccgcgatgaaggtcgggctcaggatcaggactacaagtctgcgatctacaacgggttccgtaacctcgtgccgaacgaccctgcaactcagaaggtcaccaacatgcttttccaagagatgggcatggagtacggcaagcgcggccagaaggtccgttaataacccctcactattgggatacatcaactcacgccctgccctaacccggtggggctttttcattaaggagaccacatggcaactaccaccaagacggtgaagacgtatgccctcaacggttccctcaaggacttcacgattccattcgagtatctcgctcgtaaattcgtgagtgtcaacttgatcggcgcaacccggaaagagcttgtactcaacgtagacttccgcttctccactccgaccaccatcaccaccttgcgtggttctggctggggtccggctgacaacttcgacctgatcgagatccgccgttggacttccgccactgagcgtctcgttgacttcgctgacggttcgatccttcgtgcctacgacctcaacaccgctcagattcaatcgctccacatcgctgaggaagctcgtgacctcacggctgacacaatcggcgtgaacaacgatggtcaactcgatgcccgtgcgcggcgcattgtgaacctcgctgatgcgatcaatcccggtgacgctgtgaccctgcgccaagagcaacaatggggcggctcagcgctcaaccaagcgaacctctcggctgcctctgcggctgcctctcaggcttcccggctggcatctgaaagtgcccgcgatacgtccatcacctacgctggcgaatcgtacacccatcggattgcctcggagaccgctaagaacgcctcggctgcctctgcgacaaactctgagttgtccaatcagactgcctacaagtgggccaacaaccctgagaacgtggtggtcaacactgggcaatactcagcgttccactgggtccagaaggcaatcgcccatgtggctaccgctctgggctacgccaacgctgcctcatcgtctgccactcaggctgcccaaaaggtgactgatgctcaggctcaagtgagtctcgctgctgctcaggcgaccatcgcaaccaacaaggccgctgaggctgctacaagcgcttcccagttgggcggttcgattggtattggtgacaacatctcgtccacttcgagcggtgacgggaactggaaggtggtctttaagggcatcgtacaggctgtcggtgcgttcttcggtaagcgctttgaggcccagccttacaccgagtcgactggcttttccagccaatggtccacctctgcgcccttcttgactcaggaaggtgtactcgacaacacctcagcttactacccaatcatcaaaggtaagtatggtcaggctggagcaggccatgcgccgtccatgggcgtcctgacgagaaccgatggtaaccacgccttgacactccactggggcaactcagcggggactggcccagcgctgcttcaactgaacaaagatggcctgaacgcctccttctcagggagcatctcatcggggtctactggtgcaatctactcgggtactggtggggtatacgactcaggtagtcgcgtttggtcagccgcttccttcaacccagcctacaagctgtctggtactggtggcaccacaacgatgggtaacaacaacgctgtatgtggcgtcacctacacgaacctctcggctgccaaccaagtttacaacggtgcctttgagatccgtgagaatggtctggtaggcaatggtggaccagctcccggtcacatctacaacgctcctgcgattgccttccactggggcgcgaccgttgtttctaagctgatgatgaacgctgctggtgccttgtgctggggcaacccttcctcgcagttcatgcagatctccccggatgggaacatctacggttccgtttttggcaaccagtgggtgaccggttacatctacaacaccgccaacgagcgtgcaaacgcttgggcagttcaagaagcccgcaacgtcaacaacatcggcatcgccatgtccagtctgcgcgtcaactcgcttggctgccacatgctggctctggctcacaacaactcgggcgtggagtggaacgaaggtgtcgctggcggcaacctcactggcaccaacactgctggcacttacttcgctggctacaacttggccggtaactacgttcggatgggtaagttggttaacgctgacggcgcatcccctgactccgtgaccctatacatgcgctatgcgtaaggaggattaatggctaacagatctatcgtggacgtgaagaatgtccaatggtgctgccctaacaaggatgcagcctactgcctcgtaaagttctcggacatcgaggactacatcgagtacaccgctgtgcgtggcgacgaagttgcgcatggcaatgaactattccagatcatcgaccggggtctcgctggggacatccctgagtatgccggtcctgaccaatcgcagatcgaggcatggaacctgctcatggaggaggtctctgcgcttcgtgtggagttcgacaagatcatccctgaggtccaattgggcctcgctgcacctgagcgtgtagagcgcgccaagtacctctatggccgcatcaaggacatcgagtcgtaccacaaagcgacctatgacatgacgttctgctacgtcaaccgtgaggtgtcctaatgggcatctccatcgacttcaacaacggggtcgtgcaagcgactccagtcgtaggtgccgctgtaactgacgtgactgcccggttgtttctgggcttgtcaccctcagagtggttctacgcatccgccgttttgtactccctcgtgatgactgtaatcgtggtttacaagaccgttaaagaagaacgccgcaaagacaaggaggctgagaaatgagtgatgacttactgatgcgcctgctggtcgcgctggacactgacatggcgaagaacatgttggctgacctccgtgatcctgagcgtagaacgcctcagctctacaacgctgtgggcaagctgctggaacgccacaagttcaccatcgccaagctgcaacctgatgagtcccttctgggcgatctcgcttcggctctcgatgagatccctgagttaactgacgacgagctgtacgcctcggacgttcgccactaaaggaggccctgcatgttgaaccttaaagagttcgtcatgtggggccttttggtttgcacaggcttaggtctgacgtatgccaaaggtcactctgacgcgaccgacacactgaccctcaaacatcaaactgaacaactggcggctgcccgtcaactggaggtggaacgtgaaacaacccaaagagccctcgctgatgtctcgaagaactggcaagcctatctctcaacgagtaaggcatctgctgatcggactattgctggtctgcgtagcaatggtatcagcctgtcagtcgccctcgcagatgccaccgtcaagtgcgtcacggctgacggtagacccctcgctgatggtcgcgccgagctacgagaaagcgatggtcgatttcttatcgaacaagcccaacgagcagacgcccaagtgaagggcctgcaagattccattaagaccattcaaggaggaactaa

SEQ ID NO: 2 - DNA, 40570 bp, unidentified
  source 1..40570: mol_type = genomic DNA
gatccttagcgacgaactcagggcctcgtgggaggaccgaggtacgcacagcagcagccgggtcgtaacccagtggagcgagaacgaagttggccacgccgattggagaaccgaggatgttgttacgggacatcgctgcccagcccagcatctctggtgtgaaggagttcttgaggaagtccttgcgttgctctggtggcataccctgggcctgcacgtagcgttgcgccacgaagaagcccgttgcgaggcccgttgcgacgaccccttgaatagcgaagtcgatgccacggccattcttggtggagtcgtagatgccacgcatgaggcgaccgttgagggacctgaagacgaacttcttgaactggagcgccatatgccagccagcacccagagcacgggagtcctgagaggacagcttgtgtggacgcaggatcgactcgtcggcgatcttgtcaccgatccgccacatatccattgtccgtgggtcactgcgcagagcagccgggtccttgatcttgaagccatcaccgtcagggacgatgtgctcctcgatcgcttgcttgatgtcaccgaactgttgcttggtgatcgacaggcgatgcagctccttgtcagtgaggattctcggagtgtccccatgagcagctcggatcatgtccatcagagcaccttgacggccagcgtcagcgatgtagttggaagtctcggtgagcagcttggtgaacggactgcgagcggccagttcctgagtggcgaacttggcagagcctacggtctgggcaacgaagttgttcgagccttgagtccgcagacggtccacgatgtcagcccgacgaggccggatggtgtcatccagttcacgcccgaagatcaggttgtgcatctccttgagctgctctggtttgatcttggttccccaagtggtcatctcacgcaggtaaggcacaccgtgcatcagcatccgaagatgcccattggtcaccatcccggcgatctcggtgaagttctgcacgcccatgtaggcgttcttggtgaagaaggacaggtcgttgagggatcgcagagcagtcccaaaggcatcatctgggtcacgacgagcgcgaccagtaagtagcttaacggcagactcaagggcctccacgtcagagctgttgcccttggtggtcttgatcttcaggacacgagccttgagcgcatcggtgccctcaccagtcgcagccatgatacccacgtcaccgttgatacggcggtcataggatggcatcagcttggtgaagtcatacatgcgcaggtcattgaccgagaacgacgaaccatcgctcagtggcaccgacacgtccgagtcaaacaggttacgggcttcgaggaagttgttgttctcagcacccaccagcgaatcaagaccatcgtcgatcagggccgaacggttgaagtcctgagtgtgcgagatgccatatgccttgtcatgggcgtagcgctcgacacgctgggcgatcaactcaggcgttgccaccttgccttccttttcgattgcttccttgatgaacttgtccacccgagccttgacagcagcgcgggaagcgtaggacgccagccagctcgacttgatgccttgttgcaggccgtcagcgccaccgaacttcttcaggtacagcgcacgggcagcgtcgtcatagacgttaggcacatagtggccagcgtgtcggctctggtccagcacagcggtcgcctgagcgttgccgaactgggcagggttttccaacacgtcctgcttgcgggtgaagtgctcgttgatgtggtccatcagctccttctcctgcttgctcagcatggccttcttggcgttcgttgagtcctcgatagcttccgccacgcggcgatacgcacgctccatcagggccagcctcgaaccatccataccggcatacttcgggtcgttcttcaggaggctctcagtgaggtcgttgagcttcccataagacaggttgtcctcaccacgaaggcgttcaatgatgtccgaagcggtagccgcaaagcgtccattggagccactctcagtctgcaccgtggaacggaacagtttcgagccgatgtccagaacgtcagggtcctcagagcgattcagcttgtagccgatctcagtgatcgccccaagggagaaccctttagaggaacggtcaggaccgatctcagcggccagcttgttggtcttcggattgagcgggttactgccagacaggatcgagccatctcgcagacgaaccgaaccacgctcgccggggttatccgcatagagcaccccattgaagtcctcaagggcgtcatcggagttgatcggcatacgggttgggtcatctacgccagcttggcgagcagcctcacgggcttgcaggcgactggtagggccatagaactcgtttggctcagacgactcagcgtggcgcgcaaggatggactcaacggaatcgtcggccattgtcttgaagccttcctgcttgtggctacgctcaccgtggagacccagaatcttctccagatagtcatcgtccatctcaccatcttccggcttgcgctggactggtgccatgccttcaggcaactcaacgtcacggttaggcagaccagcttcgccgtggcgagccagtacagcttccacgtcagcatcggccatatcggcacgaccagagacagcagccttggcaatgaacttgtccagagcagcagcagccgcaccaccgatcacggcaccacctacagcagcagcagcatagtggccttcgataccagtggcctgctcacgcagagcctcagagccgaccgacatggccgaactgaaggcagcctgcttacccacacgggcagcgaacgaggcaccagcaccaccgggcacaggaacgtaggtcagcgggtccagagcagcaccagccacgccagcggtcagttgaccagcccagccagccttgccgatccggcgatcataatcagcgttctccttcgccaaggcgattgcctctgggagcttgtcacggctgcccttggtgtagtcgaagatgaagccgaagtattgtgggtcgatcccttccttgcggatgttctcgaagtcctgatcgctccagttcgaggtgtcaccgggcttcacccagtccaacgggtcatggtcctcgacggtgatgttccgagcgatctgagccgggacgctggtcaatagggacgacttaacggcatcccatgtgttgtcccatgcgcccttctctggaccgttctggtcgatctccatctcgcggaacgttggttggactttaggagcatccccgagggcaaggttgaagccctgcgactcgggaagttccggcacaccctttggctggtgtctgaccccgttggtgttttgctcgaagtcagagttgagctttggggcttggggattcccatcgaaccacttgcggttcggagagtcgcccgccacgtccagcaggttggccatgtacttggcaccttcgtggctgatcttggagaagtccccacgatccagcgcggccaactggggagcacccagacgaccgttgccttggttgtaggccagtgccaccttcagcatgtcgcccttgtaggtgcccatgaggtcacgggtgtactgagcggaagcgttgatggacttgattgggtccagacgatcctcatcggtcatcagaccgtaagccttgccggtcgccttggtgaactgccccagacccagaggtccggttggggacttggcgtcagggttgaagctggactcgatgaaaatcttcttgtgcaggtactcataggggaccccattggcatctgctgcctgacgaattgcgtcgtcgtatggggtgccttctgctaccagcttggcgtattcgtctttgcggttcatgtagacctcctgttagagagggccacggccccctcggattacgtcgttgtagagaagctggccggtcttcaccgattccttcttctcgttgaacttctgctcagccgctgctgcttggcgagccttgtagatcagttgcatctgctgctgggtaatgcgtacccgcttgccgttgagcgagctgataacgatgtccccagagtcggtgccttccacggtcatcccggtgtcggcccattgagggttctcagagaggcccttcaaggtgtcctcgacgatgctctgaccgccctgccacgagttaacgtctgctgggtcagccatgagggctttcttcgagagacgaccacggagcgtcccttggtctggactggagaatgtcccgccctgatcttcggtgaacgcaacggtgttcttctggagccactcagagaccttctgttgggcctgcttggcgttgccggtgcgctcgttgtaaccgtcgtagagagtccgagcgatccgctcaaggggacccggtagagaggtcaggtccttggcgctggaatcgttcttcaggtctgcccacgcttggtcacggaacttgcgctcgtcgatgctcatgttcttggtggccttctcagcggcgatcaacacgctcgggtcagcgcctgagtcagccatgtccttcatctgctcaaggaagtcagcctgctctgggtagaccgcaccgatggtggcagggtcagcagcgtaggcacgttgcagctcagtgattcgagtcatgtcacccggctcacccgagcgaaccgcattgctccattcccgctgggcgtcagtgatgagcgcttggtagtaggtctggaatggaccgccctgatagtcagcgcgcagataagcagcacgcttggcgtccttcacgttgtcagggagattcgacttggtgatgtcggccatgatctcgttggcagcggtcattgcgtccacgcctttccactctcccgcaccgatgtccggttggaacttgggatcgacagacacgttctggccactgattcgagcctcatactgctgcttcaggtagccaacacgagcgtccccttggatggccttttgggtctccttggcggtcgcttgggattgctggcgaaccatgccgatcatttgctgctcagcgtcaatcaacttctgcttctgaggggtcatgttgtccgacccttggagccagccattcttcgcccgcaggtcttggagcatccgccagccggtctcagggttctcctgattgatggccgtagtgatgcccagctcaaactcacggctgcggctctgatagcgcttgtactcgttcgcctcggattgcgcgatggcgttctcgtagatgtccgggtcgatcaggtcagcgaccttcttgggaccgcccagaacgttgatggtctggtctcgcagggagcgaagcaggttggtgccaccgtccttctgctgcacgtccttaacgagcatcgagagggaatcaatggcctgcttgtcgctggggaaggaaccattctgcaagccgttattgaagtagcccgagatgacctcaccgcccgaaggcgagtgcatcacattggggtcgtccaacaacggagccagatcgccacgggtgttcacagcctgttgagactgaaaccacgcagagcggcgacgagcgtgcaggtcatagatacccgcgttccgctgaacgatgtccgagttgaaccccgcttggtactcagggtcgttctcgtcgatgcccgcagattccgcataggacttcgcagactgggccaaacgttgctggcggtagtcttcgaggtacttacggtccttcccatcgaactcaccattgttgagcttggtctggatttcatcctcgacatcgtaggccgcagagcgacccgacttctgacgcagcatgttcatcgcatacgggtcatcctgatacagcaaggtgccgttggcgattgcctcacggcgctgctcaggggtcagctttcggatgatctcattggacctctcatcggctgtcttttggcgctgctcggtgtacgtcccgaaggctgcactgccagacttgacgaactgctgcatggcctcagcgagacccgtggaacctacaggtgcccgttggatggacgcttggaactgagtggtcgcagtggagccgtggagccgctcagtgccaccgaagcgggactgatctaccgctctggaaatatcgtttgccattaggtcttacctcctgctggtgtgccgttggaaccgcctgccgagctgcccttcatggcactcgaaaggttcgacccttggacgtacccattggcacccgccgagatgatgcccagagcgttcgacaggcccgaggtcttgatgacctgcgcttgacccttgagggcgctcttggtgttctcggtgttggcaatctggttcgcaaagatcgactggtagtcgcggtggtagttgtcagtgatggacatgcgctgctggctcgcttcgttctcgacggagttcgcaatgcgcttcatggagttccctgagagacccgactcaccgatggcggtgcgaatggtcccttggtttcgcagggcctgcatgttgacctcagcgagctgcttacgggcctcgtctgccttgtcctgagcgttgaggttcaggttggcgttggccatgttcatctgcttgacctgctcacgggcagatcggcgttgggcgtcctcagcggcaccctcagccttcgacttatcgtgcgcagccatagtgccacccacgagggcgacagcggccatgccgatggatactggttcgcacatagctcacctcctatagccagaattgacggaaccgacatccggctggactcatggtgtgctccttagcgaagacagccccgagtgagttgagaaggcggatatggtcccagttatcgaccgacacgaagttggtcaggtattggtgcccactgtcacggagacccttgaggtgcccatgcaggagcttgtagaagcgcatccgttgtcccttggtcagcgactggaccacattggtcgtcacgaaccacaggcaattcttggagccaccaacggccagaaccaaagcgcccaccttgatgaccatcgtggtctcgtcaaggcaggcaggaagtgtctcggatggatcgcgcccactggtgtgggaatggaactcttgaagatcagcgaacgaaagattgcctgctgcttcctcaaggtcacgcttggttgcttgtgtcaagatcataaagaaaccctcatagggtgccatagtgagggtttttgaggcccccacttggtcactgttagatgccggaagaacggcggatgtagttaccttcccagccgcatccgatcacgttgagtgggttcgggttggaactggtgatggtgactcgttggttgacggcattgccggtcacagggaacttgaactgaccagtacccacggacaactcaccgaggactcgttgaatcccgaggcgaccaccagtcatcacgtagacgaactcgctggagccgttgttgacgttgatctcgaaggcaccagattcctcgtagttcagccacgcacgacgaagctgcaagcgtccaatgtcctcggtcgaggttgacccatcatcagcggtctgcttgatgaggaacttactgaactcgtactggaagatgtactgcttgccgatcaccatctgctcgccagcccggttgcccacgaacgagatgtatggattggtcgcccagtcccgagcctcgtgttcgatgagaaccccttgctggtcgatggtgtagaacgtggactcaggacccggcgttccaccgtaggcagtccgaacgtcgaacgaagtcaggttcgtgtcgatgttgtaggcaccgaggacgatggtcttcttcatgtccatgtaggtccggtaaggctcgatggaatagtcgatggtgtgctgcgtgaactccatgcgctcaaggcacaggccctctggccggtcgatcatcaggtagcagtaggagccaatgcacgaggctgcgaggacacgggttgtggccgcatcgccgaactcccagtgactgaaggactgctgctggagaatctcgtcgaggtacaggaacttgtagatgaagaccttgtttggcgatccgtccgaaaggatgctcacaaagttctcagtaccagacccgtggatcgcgtggacggtgttcgtgatgtagctcggaacgtgcgcagagacatcctcagcggacttcacgtcagagacatcctgaatcgcgtagtaccgtttgagggacgtgaaggaggcccgtggagctgcgaagtaaaccccgcgaccaatcccataaggacgggcaccatcactcacgtcgaactcagtggtcaggtccagctcgatggtcttgctcgacaggatgccgttgctcgacagaacgaactgagcttggtcggaccacagcaggagctgctcagagaacggcacagcgtacttcaggatcgagatacggttgtgcgagatagccacgtcgattgggtcgtcatcgctcagggtcgccacgctgctcgggaagaaattgaaatacttcgaggtgcgagacatgatgacgttctcacccgagaggaaacccaagcggttcctgaagaagaacacgtcgttgatcgcagagcctacgaaggacggcattgggttcgtgtcatcgtcaccagcgttgcgtccatcccacgtcagtggagtccagtcaaactgcccgtcagcggccctcacgagcgcgtgtgggagcgttgcgttgttgaaccctgcgatgatcttgggcttcgctgtctccttccagaccttcccagaggcgtcatattggacccagtagttgtcacccgaacgggcagactcaccagtgatctccacgaggtaacccggtggggcgttcgcagggagcttcgtgaaggtctggacctgatagatgaacccactgagcagggtgtcagcgtagccgtccttggttgcgatctggcggatgttgtcgttggcaggggcattgatgagaatccacccggtgcccgcttggaaagaccacccagagcctcccagagtcaccgtcaactgacgggccagctcagcggcgatccatgaggcatctgtcatgtccacttggttcatgccagcgtatgggtcaccagcgggcaccttctcggcagacccgtttggcatcttaatggacgcttgaggactggacccagtgccgtcaccgttgattgtgatcgacagggttcgaccgtactgaccaccacgcacgttgatgatcgctcgaccgtccagccgtgggtacgaagggttggtcagggtcgatcccatctggcacacggtgttccggttcaccacgaaggtgtagtcggccacagtgatgaggcgcaggtcggtccgagggttggcacagttggcgtaaccgttgtagccacgcacggtgtagttgtttcccttcaggtcccagactgccagaccggtcccagagaagcccacaaagtattgctcttgggcgtcccggttgatgaggtgaaccagcggcttggtgccgaggaaacccttgttctggagtcgcttggtgaaggtggttggtggtcgcttctgaagtccttgagtctccgaggaccacccgttgatttgcagagcaccttggtttgagaaccgaaggatgtctggttgttgcgagatacctcctttgaggttcttgacgctttgactaacgagtcccataggccctccttatcgagatgcgatgccaccgacgtaagagtcaccgtcgatcatgttgaagccgccatagtccagttcgtactcttggcactgctgccacgcttccgactcctgctcttgcagagacccttcgatctcaccagcgccgaagaagcggatgttgaagcgacgagaagccttcgccacgatgtacgagcggaagcactcaggcatctcagagaaggtcttgaagcggatcagatcgaccgtgatgtcgttggtgtaaacgtcggtcttggtcgagcggtcatagacgtacccgccacggttgacgtaaacggtgccacccgaggtggtgatccgaaggtagtccgagaggtactcaatgagtccactgaaggagtccggggagagcacagcgccttcctcaatgttgaacgtccagccacgcgattgaacttcgcggttgacttggttgaggatgcggcgagcgttcgccacgtcagcgttagggtccccctcaagggaactcacaggggactcaccgattgctgcgagcatgtcgttgatggctgcgagttcgtcatctgtttcgagtgttgcttcgtaagagcgcatgttgatcctcctaatgaaaaaacccctcaaagccgtaagggcctcaaggggtttgggttgccgttaggcggctggggtgaagaccagcgcaccagcagcttcaggacgcagaccgccgtgacccatcgcgtacttgccgatgatctggtcagcttggaactcagggcgacgagcgcgctccagagccatgtctttcagcttgacggtgccgacagccgaacggtggttgaacaggccgaccacgttgttctgagcaacacggtcatcgccagtggcggtagccgggaagatgtgcttctggttggtcggagccacgccatcggctgggttgttgtcgccagcgccacccacggtcaggtgaggaacttcgataacctcgaagcccatgacgttgcggatgttgccggtttctgggtcgatcagcgcagcgtagttcgcagcgttcggcatcagagcggacaggatcgcgctgtagtcttctggggcgcagtagaagcgacggtcaccagcagggacgtagttcttggtcaggcgagcacgagccagagtcaggcccttcaggatcgctttaccacgagcttcgacatcgaccagatcagcagcagcaccgatgttcagaacaacggcttggcccagaccggcgatgttttcgttcgacgcagcaggcaggttgcacagcttggccatttcagccagaacagcaccgtcagcggcgatggccagagcttcacccagttgggcgctgtactcggcacgaacgtcgtagtggttcatggcatcttcgatgtcgtagatcagaacgtcggaagtcagcaggccgtcgatctggatgaccttctcggaatgcttgatgtccttacgtttgtcgtcgaggttctcacccggagcgaggtagtagcccttggtgcgacccatgaccgggaagctggccgacttaccattctggatggtacggaccatgtgtttgtccatagtgacggaacgacgcacgaatgcggtcagaacttcgccaccgaagactttcaggaacagagccagtttgtcagcagccgattggcccttgccttggttggcaccgatttgttgaccgccagttgcgtttgccatgtgtagttctcctttgcagaattgataggcacatggagtccttggggtcatcccaaagaactctcatgcagccatagtgagggtttttaaatcagtgccttaccagctcgaagcgcccactcgggcctcgacttgagcacggtaggaagcgtcatcttggtaacgcttatcggacatcgcagcgatcatctcgcgttgcgaagcgaagccctcgacggtgctcttacgggcagccgctggggacgctggggcacgcttggtgaccgaacgttgaggggtcttaccgaacttcttggtgtgactcgccatgcccaagttgatgatggtcttgatggcgtgcaggtcttgcgactcgatggccttttcgagagaagccacggcgtccttagaggtcgcattgaggtgcgacaggatcgcttggaacttctcagggccaccagcgtaagcctgaatctgggccacgtaggtgttcgccagagcttcctgaccgttgatgaaggagcgaacgaaaccgcgactgtagcccgccgcttcgagcgccttcagggacgcctcggagagctggttgtcacgctcgtattctgcttcgatctggtctgccacttcggcactgagaccagccttgatggcttgctcgcgcatctgactgaagccttcggcgtactcgtcgatctgacggctggattcgaccagctcagcatcaggctcgcccagtggggtgaactcggtttcgctgccttcttcagcagcatcgttctcaccatcgccagcttcgttgtcagtgacctcgacatcggtctcctgatcctgctcggtgcccagctcgacttcagtctctgggtcgatggtctcgatggactcatcaccatcacggacagaggtcggcagagccagcatgttctgctcgtgctcggtgatgttgttgctggacatgactgccccgttgacgccgaactcggcataaatgtcggacattgaggtctccttgagttatcagaaagaaggccgcacagagaagtctccatgcagccatagtgagggttttaaacctgagtggcgattggccccggttgaaccccagcggtgtccatagcggactccattgcctcgggacttgcggtagcctgagcagcgaccccagagccaataccagcggcagcgttgaggccaccctgcttgagcatctcttgggattgcgcttgagccttctcggcctcggtgagcagcagaccagccgtgtcaatcccgatggcgttggccagtcggagcttgatgttgttcacgttcaggtcagggtcaccattcaactgcgacacggttgccacagcgttcaggaactgggtcagcttatcgaggtcctgaccacggcccagtgcttcagcaccagtcgttacggttggttcgacagcttcttgaggcaggttcggaatctgctgggtcgcttgcagttggttgagcagcactcgcacgattggcagttgcagctcctgagagagaatcgaatagacgcccccaagggtgtcctccagttcactggcgacgtagcggatttcctcagcggtcacacgctcacccgaccgttgaacggcagagttcagcatgaagacatagctcaggcgtgcctcaatggcatcagcaacggacttggccacagtgaagtcagcggtcttctccagttgcaggaactcaatgtctgccttacggccagccacgaagtcaccagtctgagccttgaccagacgacgaacctgagtgatcccgttggggttcacaaggccgacgaccttcgagctaatcatggcgaacttaatcatggcctcattgagcgactccagagagttcaggtcgccgaggtattcctcaacgtgtgaacgtccgtagtgctcgccatctcgcttggtccagcgcacagcgatccacggcagggcatcttgagggtactgaccatcactcccatcgacctcaacgccttcgatctcctgatagctcaggaagtcaccagactcgtcgtcgatgtaaatgtgggtatagacctcaagctcctgctcaggcttgtactcttggccaccagagaggctgttgcgaacgtcctctgggagtgccgcataggccaccttgtcgagcgtcacgatctgcaagacgttcccgaaggcatcacgctggaccacatggttgtggagcgtgtagagcttcatcgggttgtacgaattggacgatgcgtcaggtggtggtaggtagatcagagcggtgcctgcaagggccaactgacggatcaactcaaagagcgtcactcggtagctgttggcttccatgtaggacatcaggatgcgctccaccatgcccagaccttgttccaccacagccagttgcgaagggtcgctaacgagctgctttgcctgccactcggagaccttcagcttcatccaactttgcagtgggaacagagcgagcatcacctttgcggacaggttgttgagaccacgagcgcccactgcctgccacggagtcgtgtagtcagtcgagctattgtcggagtctttggggaacagggaagggatggtgaccttggcgcagttttcagcacgggtctcgtaaggtactcggtcgttcttcagtcgttcgtaaacggctttcgcgccttcctcagcgagaccttctcgtttggtctcggccactggtcacctccttgtcagatgttgatgccagtaccggcagagcgagctaccgacaggccacgcttacccttggcacgagcagccttcttcgcagcttcggtatcggaatcgtcctcaccatcactggaatccttcggcgcttcgaccacagcagcagcgttcgctacaggtgcaggagcttccactggagcggcctgttggaccacttccttcggcttgtcttcgctgccacccagcaggccaccagaggccacgccagcgaccttcgagacgctcttggtgaccttcttaacggccttcttgatcttcttgcccattgggtttctccttcagtttcgtgtagttgatctcatagcgtccttcgcccactcggtgggtatacgccatgaccttgtagttgcattcacgggccagcttaatgaggccacgttggagcttcatgcaggtgcccgctggggcctctggaaagaccatgcgccactggacgcccagaagggcacctacatggctgtcatcgtcgtccgtcgctacagcgaaccccacgagcttcccagaggcatctctcacgaccagctcgacccactcatcgagtgactcagtggccgcacagatttccgcatgggcctcgtaaaaggaacgagtccatgtcatctcagggaactgctcaatgatctccctcaagcgctcacgaaagaccgcgcggtccccgcattgacgccattgggttatcacttggtgaccttcttcattgcccgcttaacaggcgcagagatggtcttgcccatgccggtatccttggcagtggcggttgtagacccatcacccttgtcgctggtggagtccttcttgaccttcagagagtcggtcccagtctcggtcgattggtcatcttccgaggccccgaagtccacacccttgggttcctcaatgagaaccggctcgggtgccttcagggaatcaggattggtctttggggtcttgaccttggatttgaagcacatggtcattcctccttctgtaactgagcctcctgcatcagctcggtgatctcgacagcagcgttagcaccgtcaaggaagcccgcaatgtagccctcggagtagccctgtttacgcaggtcatccacgatgccagtggcaatcaggtatgaggcgttcaggcgtacagcgaggtactcagcagcggctggagcgatgtcaggaatgtcatcagggttttggatgtgatgttggataactttgagcattggccctccattaaacgaaaaggccacagagataacctaacggtcccctatggccatagtgagggtttttaggcagcagagcggcgcagggacgaatcgtgtggacgccacaggatcggcttcatggtgcccatatcgaagtcacttgcgcggcagatacgggcaacctgagcttggacgatgaggtcttcctcagacatcccctgcttcgctgcgagggacgccatgcaggcccagaggtcaggaccttggaacaggtcgaactgctcgtcaccgctcttgcaggaggtccaataggacacttcctcacccttgcgtggaccggacttcatcaccttggtggcctgatagaagaactcagggttctcgacgaactccttagcggtctccttgcccacaccggggatgccaccatagccatcggtaacgtcgcccatcatggtctggatcatgtggaacttgtcggcagtcgcctcgtcgttcttcacaagctccatctgggtcaaccagaagaagtaaccggggaccgtgttgaagtccttgtcgcagctcaccgagataacccggtcgcaaccagcgagacccggattggtcatcagaatgccgcacacgtcgtcaccttccacaccgtgccacttgaacgaacgctcaggaccgaagtggtccatgatgccttggcagaagtgtgggtatcctactggcttgcgcttgcccttacggttggccttgtaggtctcaaggacctccttacgccagttgtcgtcgcccgacaggatgcacagatcaacgaactcgtaggcttcaggagccagcttgtacttgcgcttgagctgcccagcgatgtccgctttgatggtcttgagggtgccgaacagaatgtcacgggctttcttgtgatcgcagttcagcgtccacacgtcttcgccccagtccacttcttcttcgctggcgctcatggcactgaagatgaggtagtccatgtcaagggcgaggcccactttcagtttgctcatagggcacctccatattgtgcgaggaactgctggccgctcgtagtgagagaccagaagcccatgttcttaccggcagtcgagaggcacgagatgtgcccccggcaagctgcctcattgaccagcgcaatgcgcccacgaacgaagtcgctctggtacgcacgggcagccttcttgagtccccagagggtcacgaggtactcattcatcccggccaccgttggcgatcttgcactcgtaacaggcattgcagtcgcacgaccgggccagcacggagttgtcctcgaaggagacccttacgctgcccagacgaatcttggcttcgttacctgcgatctcgttgcgcatgtccttggtgatgaactcacggatacctgcgcggtagatcagctccagcagttcttcctcggacttgtcgccacggaacaactcagcgcggaacttggtctcgcccttcagctcagcgatcttctcagcggggatcaaacgggcttcctcacgggttgccttcagagcggtgatggtgtcggtcgcaaccacgatggtcatcgggaaggacacgttcagtttgagagtcttagccatgttggcctcctatcagtgacattcgcgccacgtcgcaccgatcttgtagtcagtgtcgagttggcaacggaattggaaagattcacccacttcgcggatagcctgttgggccaccttagcgacgatctcagcgatctcgggtgtacgtgcagcgatctggagttcgtcgtgaacccacgccatgtagcagaagtcaccgggcgtgccatcgtctttgtaccagccgtggtaaagcccatgttcttccatgaggattcgttcgacttcgacgacccacttcttgcagatgattgcgccagcggactggagcaggaagttcaacgcagagtggggagagcggacgtgaatcttgcgaccgtccagaccacgcaaccaacgacgcttccacttgatgtcgaaacggcgggtcgcttggttccacttctgctcggtgatgagctggtcggcaatcgcaccctgcaagccagagatggccggggtgttctccatgaagtctttcttcagggccttgccttccttcttaccgccacccacaaaggaacccacgagttcatcaccagcgccatagaggaacgcatagatgaacgtcttggcgatgccacggacacgctcatgttcttcgttgtgcttatcgcgctcgtcgaacttgatgatgccagcagccttgccgttgacccagtggatgtcaccgttgagcacggtgtccgcataacggccttcgtcgaagggtgccccatagtggcccaagcaacgcagctcaaggccgctcgcatcggtgcccacttggacgaccttctcccagcccttacgcttcttcgcatgggtcgccccaaagagcgcacggcagtgaggaccgtaggtggcactcgcagaagggacctgacccatgttcgggtaggcgtgagtcgctcgaccagtaccagcgccgttggggttgatagaaccgtgcatcgcaccgtcttcacccaccagcttgatccatgcgttatcgccttcggccaacatgccgatgcgcttctggatcatcaggtactcacggatcagctcaatcgctgcctgcttctctgggtcatctacgcggacgtgttcgagcacctcatcgtcaaccttcggagcaccgttgtcggtgaactcagagggttcccagccagccttcttgagcatcttgatgatgtgagggcgtgacgttggattgaaggtaacgaactcgaccggggtgtatggtgccccagcgaaggtctcgcgcttgtccttggttttaccgttggcgttgtacacaccaccgaccttcggatacttcacacgaggaatggcttgaccagcgaacggcccattggtccacgtctccagtggcttgtcgctaaccgggtgacggaactgctcggtgccacctttcggctgataccacgacccgaaggtcttgatgagcttggtcagcaggtcttggcgaatccctgcgagttccgcatagagtcgctcagcaccttcaaggtcgaacgggaatccgttgcgctccatctgggccagagtccatgcagcagcgtgctccattcggacacactcaatggcctgaccatccacgaagtagtgggagtcctccatgagcttccgaaggagcttcgaggtaacgcgaacgtcctgctcgcagtagtcctccatcgcttggttgcagacagcccattcgagacccggcgtgtagactccaccatccgcttcgagctggcgcatgaagtcatgcttgtactcacccttcatctcaccgaggcgatagccccacgcttccagagagtgagacccgaacatcttgcccggtaggatgccagagcgcataagcccagcgtcacggtcacggatgttcgagtggatcagtcgcaccagtaccagcgtgtcgagcaccttcttgcgagggatgttcagacgcttgccgaagtattggcgcttcagtttgtccagcgcagggatgtcgtacttgatcccgttgtggaacacgatgagaccatccggcttcgcagcctcagcttcgagggccttgatgtagtccccaaaggtggcctcattgaagcgcgtgtactggccggtgaaccagtcctgaatggtcgcgcagtggaacttatcgacggtctcaaggaggccgttcgtttcgatgtcagagatgagcatggttgccctcctatcgacggaagacgcaggcgctcagtgggagccagacagtctcagggtggaatggacgcacggggaacgagaacaacacggcatagccggtgtactcaggcgagcggtggtagcgcacctcaaggcaggagaactgccgattggtgaagtgggtcatcgagtagccgtggagtttcgagtggctcggaatcttggcgaccatgatgctgaacgggagacccttgaggtccttcacggagtcccattgaggaccacgcagatcggtgttgcggatcgcgtcagcttcgcccttgaggtatgccttcgaggtttcctccttgatggtcgcagcgacctgctcggagaccatcgccttgataccctcaatgatcgggtcgagaggattcacaggggccacccaatgagggtgctctttgccgttggccacgtaggtgtagcccagcgacttgagaacatcgacggcctgctcgccttgcttcaggtacttgcggatgtcggaatggttcatggtgtatctcctattgagtggcgtgtgagttaaccgaaagggtccccgaaaggaccccttgagttacttcactcgggtgatgtcttggtgacgccagtcggcctgcacgcgatccgagacggtctgctgataggcagcttgggtagccgcaatggcagccttcagggacgcctcacgggcgaccagcttctcgtgacgacgcttggcgatgcggccagccagaacgatcagagcggtaacgatgtcgaacgatttcagtgctttcatgtggtggttctccttcagttaaaagtcaggttcttgctggtctttccacgcctcatcggcttcggatgtgtcctcgggtttccagccttctggcattggttcgaggcgaccagttgctttgtcgtaacgcatgaatccagccacgcccgtctcgcccgtgaagcggcacttgagaacgcggaacaggatgatgtgagggaatgcgccttgctggtttcgctccagcgcgatgatggtgtcgctcagttgacgcagaccgcccgagccacgtagatcggtgacaacaattggtcggccttcctcgtgtggcttgcccttgtcagggttcttcaggtgacagatcacgaacactgcgacgttcttggtcttggcaaatgccttaatcttggtcatcagtcggtcgatggtcttacgctcgtcctgatcgccgtccattgcagacacgacaatcgagatgtggtcgagcacgatcacccggcaaccttcggcctcgaccatgtaggccagcttcgccagcagacgatcctcagcggcttccgcaaaggcgtcatacaggaacagcttgtcgctctcgaagatttcatcgaaggcgcggtcgaagacttcctcagtggtctcatcagggttctgacggacacgagcaccgatgtgcaggccaacgatgtcctgaacggtttcctcaacggcttcctccagcatggcaacgccacacggaatggactcgttgtggaacaggttgtagacgttctgacgcacgaaggtggacttgcccgagccactaccagaggtcacgaggatcacctcaccaccacggcagtccttggtcatcttcttgagttcgtgaggggccaccagaggaagcgaagggatcaccttcttctccttcaagcgggcctttagggacttcgcagagacgaccccatcgggcacgaaaggctgggcattccagatggcgtcagtgacagccttggcgttgccctgcttgacgcactcgttggcatccttgaagggaaggacagcgatcttcaccttgcccggtgggagtacctcagcggcctcctgagaggctgcccgaccagcgtcatccatgtcgaacatgaggatgatctcgtcgaacgtgtcgaagtattcgtagttactggcgcaggtcttcttcgctgccttggagccgtgcccaatggagaccactggatacttgccaccctgcaactgagccactgtcaggcagtcaatctcgccctcggtgaccacgatcttgcgaccaccagaccagagctggcgaccgaacagagcgtccttgtcgtgtgctccagcggtgaagaactccttggtggcgtcccgcaccttctggcttgtcaggttgccctgagcatcgtagtagttggccacttgagccatgaccacttcacgcttgatcgggtgccagaccttgccgacccagtagccatactggcggcagatagcctcctgaatgaaccgagctggcaggtcttggaatcgaccttgggacttggcgaactcgatgcagtcagagttgcgctccttctggacacgctcaccagatgactctccatcacccttgacgtagtggtcgcaggcaaagcagaactggtggccgtcactgaaaagcgagttggcatctgaagacccacagttctcacaggggatgtgcttcaggaatacgctttcgctttcttcaggagacgacatcagccacctcccgctcatccacgtttggagccttgtcgatcaagtccagccacttggcttccatcttctcggcacgcgacccacgagcatcctcacggagtctcacaaggttgctccaatggctcgcacccatgaagcgaatggtcgccccttcgatgccccgttggatgcccacgatggcgaactggttgaggttgtagtcgaacttctggatcgcctcggagacacaatcggtctcgtagaggatcacgtcgatgttcgatccttcgatcttccagaccccttgcagccgatccgagtcagacccggtgtggtacttggggaacttctcgtaggaataaccaccttcatcgagcgctctggaaactgtctccgggtcactgcccgcgcaaatgatgtcgatgtctttcggttccaccccgaagaacaggtcacgggcacagccaccagcgatgatcgcgccgatgcccagtccaatgagatgctcacagaggtcgaaaccgccttgcagtaaggaacggttcataatgtcctcctaaagtcaacgcaaagaggcccacacggaacgaatccatgtgagccacagtgagggtttttaaatgccagccgtcttgagccagtcagagaccttgaaggaagggcaggctttgccagagtcgaggtcgtgatgaccaacgatctgggcttgcgggtactgacgcttgttggcgatcagcagcagcttgagcgatgcgaactgctcaggcgtgaagttgttctggggttgacccttgtcgtcgataccgccagcgaggcagatgcccagcgctcggctgttgtagttcttgacgtgggacccaatgacatcgtgaggacgaccgttctcgacggtgccgttacgacgaatgacgaagtggtaaccaatgtcgagccagccttgctggacgtgccactggcgaatctcacggacgcctatgtccatgctggccttggtagccgcacagtgaaccacgatgaagtccgtggctggacgcggtttgaattgaaccttggccatgactaacctcctttcttcggtacgagaaccccttggggtatctctttgcgagcctccttcagccagtcacgagggaccagcttgtcagcgaattgaatgttgtacttgcggcaccaatcggcgtaggacgttggcgaccccttgtagattttcgagttggagttcgagaagaccagtcggatgtcaagctcggggtattgctcacggatgagcaggtgcttctttcggtcgtcagtctcgaagatgcccttgcattccacgatgatcccattagccagcacgaagtctggggtataagttgcatcgcgtgcgggtacaacgtacttgatgtggaacttctcgaaatcatacttgaccccgagcttctccatgtgcttcgcgttcttgtcctcaagaccagagcggaaagctcctactctggcgttacgaggccctgcgtaatatgcgcccatgtctctcgtctccttaccctcccgatggtgggttgcgatacaccaagccgcttggcaaggtgtctctgaggttccttcgagagaaaaatctcgatggcaagttcctcggttaattttgataaaccttgggaactcccacgagctatgcggccacgctctacgcagtcctccatgttgtccttgagggttcccaagatcagatgctctgggttacagcacttcctgttgtcgcacgtatgtcgaacaacgagaccctctgggatttccccattgaatgccgtaaaggagagacggtgtgctgttactgtcttggacttccagcacgccatcccgtaccctgtcttactgaaagtggcaccagtccactcccagcagtctcccttggtgatcttggactcgatgtaagaacgcgggcatgtttgtcgtctgccctgcgccatcagaagtcgcccgaaccgtactgaccttggtcttcgccttggtcatcgtcctgctcaccgcgccagccttcttcgcggtcgtcagcagcttcgtagccttcttcttcctgaccggcccagtcgtcaccaccagcagcgaactcacgcagctcgatcagcatcacgctgtccagttgcagtttcacgctggcaccaacaacggcaccgaaggtgtacgggaagatcgagaagcggaccttcagcttggaaccgccagcgatggcaggaaccgcttcgatgcgcttgcccttggcgtcaacgacacgcagaacgatgtcgcggttctcgccagtcttctggtccttgtacgaggcataaccgctgaacttgaacgtgacggtgccatcttcgttctcgaagaaaggcagctcgccctgataggcttccagcagtttcttgccacgggccagcttggcttgagcagcagcacgaccgccgttctcccacgcttcgctgatctcagcccagttcttgtcgtaagccttggtgatcttgtcgatcaacggctgggcttcacgcgaaggaatggtcagcgagaccttatagacgccacgagggttaccgaagcccttctcagggttgccgaagtcaggcttctggatcgagcagtacggctcagcggtgccgactggagtgaacaggaattgcttggtggactttgccatgtgattgtctcctttgaatcagttgggaatgtgtgcagccacagtgagggtttttaataggagagcgattcgcgctcggcgatcagcttccctttgaagtcctcaatgactggctggcgggtgatcttggtggtcgcatggacgacctcacggaagttctccttgaggaactctttgcggaaccggaagcagccgtgcttcacatggacgacctcagtgggcacgccagcatcctcagcgatggcctcaaggaccgtcgcacgctcgaccagaagggactcaacgatctcctgttgttccttggtcatcaggtggatgtagacgactccggccatgccagagtgtttggtcacggtgaagttctggatgtgcaggaagccatcaggcatcgaccgggtgttgccttgggcgcggttcataccgtcacctctggacgcagccggtaaacgttgtcctcaccgtattccagatcggccacttcgagagcggtctcgatggactcggcccagatcgggacttcctgcatctcgccacggaacttcacggtggccttgaacagcttcatcttggtgtctcgtttcattcgattactccttgtgctcggagctggaccagcatgtcgctggcatagccccattcgttcttcactacggcgtccataacgtggtcgcgcagctcgatgtcggtggcgtgaagtggcgtagagtccacagcctcgattggccagccacggatcaggcgcaccagatgagcaccgagaccctcaagggccagatactcgttggcttggcgcatgtcggtgacgaccacgagggaatcctctggggccttctcgatgagcttgaggccctcgttaagccacacgtcaggctcgcccttgtagttgcgacggaagcccgtgccgtactgctggagatgccagcgaggcgactgaggtgcggtgtcgtcccagaagttctcacggagccagtcgctgtactcggagtcggggatgttgttgatcgagagttcctcgaacttggcatccttcaggtccgtgtgcatgtggctctccatgacgacctgagcctcacggcagtcagtcaggacgagcgagcactggtgcttcaggacatccccgaaggcgacccgatagacctcgaagccttcctcacggagcagctcgacgagggtgtctttacccgagcgaccacgctcagaagtcagagcgataatcacgcggctcatgcgaagacctccttcacgatctgccagacgagggcacagcgagggaacttgccggtgtagggtttgagcacaatgcggcccagctttcgggattgcgcaaaggtgcccttggtgacgaggaacttggtgccgaccgggttgatgagaacggcatggaagggaaccttgcccagccatttaacgatctcgcggtcttggcgcacggtgaagtggccagttcctttgttgctgtgaagcagtacaggttgggtcatgtgaacctcctttgggttgttcgatgtgtgcagccaaagtgagggtttttaaattcggtcatcgaaacctataaacagcagcgatccagagcaggttccaaacgactatcagaaaggtccatcccatagatttctcctatcgtaacgagcacaaaaaagccccaccgaccgaagtcgatgaggctcgttgagttactccttaatggtggcgctggagattccccggaaggaatcgaacgaagggtggcgcagagacccgtcagggtagcgttccatgaacgtgaccttcgcggtgtggcccttgtagtaaccgggcaggcgagtctcggtgtccgtgaactcgtccatcagtgcgcggctgatcttgcaggcgttgaccacatggcccgactccagcagtaccttgaagccgatcaccttgccctcgttggccagacccttggtgccccagatgacatcctgaatgacgccatcctcgttgtcgtctggaaccatcttccaccagccgctcaccttggagcgacgatagaagcccatcgggtccttgcaggccagaccttcctcaccacgctcacgcacagtggcgtacaggtgggtcaggctcagcggtggctgaagggtcacggtgatctcgttgccatcctcgtcaaccgaagggcgctcaatgaccggcatggtttccatcgagtagacctcataggtctcagcgacgatccagtcgatctcggggaagtattccttgagcttggcgacttggtactcaacgtggcccttacggacacactgcatgacatcgtactcgatgccctcagcgatcacgtccagaggcacgatgtcgaacacgtagacccggatgcggttcattggcaccggctcatccttccggcgaagatcgcccgaggtgttcttgcacttcttctcattgccttcgtcgtccagcaggatcaactcagcgtccagcatgaagccttcgtcattgaacagggcttcaccgaggtgcgggttgtagaacttggaccagcgctcgtccccttgcaggtactggaccagagccgggaagcgcttgccctcacgggacagccactcgacgttgaccagtggagcgcgaccagagacgcacaggttgaggcgaacgccatccttcttcacgtccacttgcaggtacgactcatcgagcacggcctgcatggctttctcgttgtagtcggttgggcggaacggcttggtgttcaggatgacggcttcgactttggacattgggttgctccttactgggcggctttaggggtgcgtggcttacgggtcttcttggcgggtgcttcaagcgcctgctcgaccttctcagcgagttcctgagtggccttgacgccgaccccagagaaggccacgtcggtcaccagagcttctggcgaggcgatcttggcgagcgcttggaagtgcagcttgacgctggtctcggtcatacgctcagcggactggcgcagggcttcgacacgttcctcgaaggtgcccgagagatagcggttgtcgagcagctcaagtttgtcgtagccagcgcgggtggtggtgacagaatcaccgatggtcactgaggtctcgatcaggaccatgttgttgtccagcacggaactggtagcggcgatagtgacttgcattagttggtctccttcaggtagcggatggtttgttgggcgatgtcgagggacaggtggatgacccgcccttcttcgccgaggtattggtagagcagcatgaggtctggattaacacgaacctcacgggccagagcctgtacgatcaagcgggcgttgtcgtcccaccagtcgatggtgatccttacggcgctctcacgggttcccacttcaaccgtgatggtctggttgtgtggatgctcgcagataacctgacggacgttatgcaggttcattcttcagaccactcctgacgacctccacgggcttgcttgttgcgcttgcctttcttggagcggacctgctcgatttcctcgaaggagcggcgagcgttggtgcgggtggttttctcgaagttacgaccgaacatgaattggtttccttgtgttaagcgaatgcgaattgggatttgagaatttcacggatgtccagcgtgcccatctcagggatcggtggcatcttgtccagttgggattcgtggagctgatccatgaactgctcacggaagtcctcaaggacgttgttactttcgtaggtctcgaccatcgtctcgcggactgccttgaacatggccccagcgtgtgcagggatggtgccgaaggagtcgtggatgagagcgaagaactcgatgccataccgctcagcagcgtggaccacagtcttgcgaaggtgggagccatcttgcgagtggacgaagttcggggagatgcccgactcttgcttgcgggcgtcaatcttgtcgctgtctcggacagtcacggtcgcttgaatgcgaacgtcgccaaggaacatcaggtcgattcgccgggtctcgggaatcatgtactcctgccagaccgggaagccatcaggcgtgacccagtagaccggcatcgcaggcttcaggacctgcttggtcttcttgcacttgacctcagaggcgagcagcttcgcagccttctggagccagttcattgcttccacagcagcgaccacaacgacgctcacagagtcccagattttgccagccatgtagcggctcgcttcgcccggactggtgaacatctcaccgtcaccgttgtcgatggccttcttcacgatgtcctcacgaacctgatcggcgaacccgtaggctttcgatccgtaggcgagggtcataacagaccgcttggttacctttcgggacatcccgtaggtgagccacgccatagcgagggtttttgttccaaggacacgacgctcggtgatctccccggtgtcctcgttggtgtcgagtaccgtggaatcctcggtgccgtacttcaagtcccactgaagggcgatctcaacctcatccgagaccagcttgtagatgtcctgtacgtcatcacttgggagcaggttcacagcacgaccaccacgctcatcacggagcatcgcagagaagtgctgaatgcccgagcaagaaccgtcgaaggcaatcggcagggcagacacatgggcttccccgtggagcttcacaccttgccactcgaagcagaacgccaagaagcagaagggtgagtccatgtccatccagtcggtgttgatgagcgggtcatgggcacagcgaagaatcatttcctcgttgtccttgatccactgcttgcgctggctgaagtcaaccttatcgaccccggcacagttcgcaccgtggatcatcagccactcgataccgtccttgcccaccggctcacctttggcagcctgaaggatgcctttggtcatgtcgttggattgagggttgaacgcagggatcgcatagacccggccacgccagtcgaggttgtacgggaagtagatcgcatcgtactcagcgaacttgtttgcctgctcaagagagaactcataggagagtcggcgagagacccttgcggcgtcctttcggtacaccccagcggctgccttcttccacgccttcaaggcttcctcgttggtctcgatgtcacccggcttgatcggcagggcttcacgttccgttgaggggaactctttgattggcacgttctcccaagacatcacagcgtttgccacagcgaggactttctggttgatcgcccacggtgttgcttgtgcgaggttgacggccttgtagacttccggcatgtggacatcgcggtagcggttgagcgctcgctttgtcgggacacggatgaaggtcacaggcttgcgacccttggcccagtagccaccaccacgcacaccgttccaaggcttcggaggcacgaccattggctggtagcgcgggaagaccccagacaggatgtacgcacggctctggagcttgtcggcccattccgctttcaggtagacatactcaccgtccagcttcttgttgcctttgtgctcacgaacgacctcgataagctgggtcgattcgatcagcagttccagcatacggatgcccatgtggtagcggacatctgcgccagactggtcccactcggtccaaggctcgttgagttgccctgcctcgatcatgtgggcttcgaccttctccatataggcgaccttgtaggtcatcccattgcgctgggcgagggccttcttgatgtgcttctggtagtgctgttgctcaaggacacggatgcgaccgaaccgtgcttcttcctcaagggcaccaccgatgctcacagccatctcagtgatggtcggagcgccagagcgttgagcgatacggttgatggtccagcgaatgacaatggatgccatcgtctctgggttcatctgttggaacgccccaagggccacatgcttgcggcgaaccttggtggtctggtgttcgatccaatccgtgatggccttggacagcattgggaccagatgaccgagcagcggtttcgctacttggctgttggagaactcacctcgttccatctgccgttccattgccttgtggaaccgttcttcgccgagggtgtaagcctcatgttcgagctggagttgctcagcggcgagtgcaggaccgtagatgttgctcaaggcatcgaaagcagcagacgaattgatgtcgctgaagtcgtgacgttcgggaattgcaatggtcatttaatcgtctcgaatgggttagcgatgagctgcccacacggacggtctttaagatgacctttgagatgtctttaagataaaagcccccatagtgtgtgcagccacagtgagggtttttaaatccagcgttacttggtggttacgatccgaccatgaatgtctgcgatcttgtagataaactccttgatctcgtagtcatcgttcgccttgcggagaatctcgcgggtcacgttgagacgctcttggtggtactcacgaagggcagcgtccagagcgtcacgcttgagccacggatagcgacccgatgacatctcaaggagctggcgactttcggagttctcacgggctgcctcggtgatgtcgaacccggttgagtgctggcgaatcctcagcagatggtctgtaacgtccacctcaaggcgttgcacccagcgcccacgagggccaaggccaagtgagaacgtcgcgtcagtgagcttgtggaggccatactgaccatctggacgggagaccttaaaggtcacctccttgacccggttcgtcggtggtggcatgactcgattcatgtcagaagcctccccggtagcagcgggtgaagtcgccacggtcgctgtagcgcagacccattgcctgctggattgctgcgatgttgccaaagcggtctgcgacagccttagcgcccagtgtgcgacgaccaccatacatggcagtcatcacgctcgctttcgcctctgggtggcgcatggtggcgtcaatagccgcttccttctcactggcgatctgctcagccagcagcccacggcgggccggtttgtagttcgtgtgcatcacttgatttcactccagtggacgagcaggttgcgctcgccttcgataacagggattccgtagtgctgggtcgtcttgccgcagaacagcattgcccagcccgtttcgttttgaggaacctcgacagcaggtgcgaagggaccccgatagaccatcgtgccaccgcccttgtggtcgtcattgagggccaccacgagcgttacgtcagagtcttggtcgatgtgccagtgaccccttgagatgcccgtagggacgtactgagcggcttggcaggtggtcaggttcacagggtcgagaccgagcagcacctttgccagcgtcacaccagcgtctgcccagaaggaccggaagacctcgaacagaaccgggtgctcgttctgaaagaccacctcgggtatctgcgcttcctcgggttcctcatcgttgaccgtgtgaggaaacttcttgacttccttgagaatctcagcgcagtaccgtggcgacaggtaagcgaccgagtagacgcccggtgcatgacacaccacgcaatcgtcaaggaacttttggaaaccgctggactcagagaaacaggccgcagtgattgggccttgcgtctcggcgagttcggccatctccttgatgtacgggagatgttcacgtagcagcgggtgatacttgtccaccgatgcgataccggtcacagcatggtcaaggacccggctcatgcgaccaccccttggcaggtgccatacagcagggcttcggggtcgaggtagtaaccctcaccttgtggcagttggccgttgcggtcgtgggtcacatagaagcgcttgcggaaccacttgcgccgccagtgtccgtacagggtcaggccagaaggcagacgccacgaaacgagaccggaaggcaggttaacggcaggctcgggatcaactttaggttccactggtcgggcaggtgtggtaggcagctcggtcattgtataaactttgaccagtaactgagagaactcggtgaggtcgtcagcgtgccaatcgaaagacgcctgcaagatcacgtccccgacttcctgcccattgcgggcaaagaattccagttgaggcttgccgtccagcatcttgagagccacacggagccagcgttggcccttgcgatcctcaatgtactgagggatgcccgaagcgattaccgcttggatggcggcgatgatgctcgttacgacacgagcggacacgaagttggtgcggttgtagcgcatagcgtttacctattgattctcagaggttgattaagcgaagtgatcggcaaggaagcccatgacaaagcgtttctggtcagccgggaagttgcccgtctcggcttcgtacagcgattgctgctcagtgtcagcgacatagacgcagtggcacacgtccacccactcggcagggagatagcccttcaagtcctgccattggatgcgcgacagttccacttcgtcagccagtgtgaactccttgttgtacagcagatgaccgaagtcatggaaggtgcggaacgtcaggttgccagagccaccgtagatgctcgacgtgttgaactcagtggagaccttgaggaaccccttagcggcgtccgctttgagaccctcgaaggtgctcggtgcgtccagaccaatgcggccatccagtgggaggatagtgcggtactcagcgatgcacttagtgtaagcctcgaccagcaggcaagcggcacgagcgaggatgaattgcagttgacgattggacatggtgctaccttcgattgttggtggtacgttgtggtgtgcgtgattgcttccccaagggacactcagcgagcgcccttgagtgaatggtcacccattgatggtggtccagttgccattccacggttcgccattgaggaaccatgcgtagtccttttggttcacacggacgcccggtagaccgttcaggcgctctttggtggtgttgctcgaccagccaccgtcgcaaacctcaaaggtgcccattggtcccttgtcgcggcgtgcaatggcgttgccgtggagcttgagaacgatcacctcaccgagtggagagagttcgaccgtggtgttaccaccgaagctaccagtgcggccagcgatgaatgcgtttacagcgtcttgcgttactttgcgtgccatgatgtcagtcctgttgtctgatccagtgttgtgcggtgtccagtgcgtccaatcggtcgctggtgtgatagtcagcggccttgttgtacccggtctttggatggtgaaacttgacgatgtactcaccccagcagccatcggtgtataccttggcgatgcggccagtgtcaccgttcgacagctcagagaacttccggtgtgccattactcaggctccttgtcagcgttcattcgttcgagtagctcagccttagtgcgatgccagagcgcttgcaggaccctttggtgtaccagagtggagtcgatacggtcccgaaacactccccacataggatgcgaaggagggacttcaagacgaccgaaggcactctttgcctgctcgtgttcgttgatcgctaccttgatgcgctgctccagttcgtgaagctggtccttgagcttgtcagttgcaatgctcatagcgtgcgtccttcagtgagggtttacgggagatacagacgatggtcctgttactgactccttgcgtggactgctggtaacccagctactgctcggctcacacaagaccatcttgctgtatttcctatcactgccacgcaccgagggcctacaagcctcctatggttgccctgagaggcgagaccggctcagtgcgtggtgtagcattccgagttgttaaagagcgtaagggtgcccgttaggccgtgtctatcagccaattcgttgccctttcgagacctgtaagagcatctcagtgttgccgtgttgcgttgttgatggtggccattctacagcgtttcaccatcttgtcaagcgtttgtttcagcccttgttgctactcacatgctttagggtaactcgaagtattgcccgacccagcttgtggcccttataggctctggtgtcgatccctatggtcatctcagtgagaccgttaggaccaaggccagagaccgtggcgatcaactcagtgtttgccgttgatgggagccattagacaggaataatcatgggtcgtcaacaactgagtttctatcgttgcctaagagctgataggccatccctatggatcctgatcctatgggtcatcaggtagacagtctttgaggggggtccttatgagcgcacacacgcgatagcctatggatggtctcagtgtcaagcctatggatgacttatagggaactcaaggaggacttacagatagggacagatagaggcccattgagattccctatgatccccatgagtccccattgagataatcaattggatcatccctctgagctggcccataatgatccccatgagatgcccttgagggaaacgaggcgatctcactcagaggtcaccggggaggtcaccctatggatcatccttgagaggcccctacgggggaactctcggctgttgtccttgagaggtgaccattcagatttttctgtcagattcttaaaggtcatcctatggtaacccaacggttcatgcaagtgccatctatcgggtagacctaacgataccctaaagggcatcctatggagaccagttagggaaacgttaagccttgctcttatggctcaatgaggtagggtgttaaccctgccgaaattgagcgtcagtcaccgcatccgccagaggccacacacacgatggtggagacccagcccataacatcactaccacttgccaccccgaaggtgacgagcagaaggccgatgagcttgtaggtggaccgagagagggcaaggcgctttaagacgagcagcacagtcgctctctccacggtcatggccttacctcctttgttgataatcactgttgaattggtcgagggagaagcactgcacgaagaacctaccttgtagggatcgtgcagagtctctaagtttatctatgagataaaccccctctctgggccatagtgagggtttttaaatcttcgtcgatcttgctgcgatcttgcagagtccttaccagcccatgtaattggacattgagccatcgtcctcgtactggatcgacacaccttcgctgatcgacatctccagcaaccggtcgtgacccatcagggcgtcctccatgtggctctcaaggaactcttgcagcatctccgactcacctaccttcgagtcccgctccagtgcctcagtgaagaactgaacgccaatggcgagggcatcgagacggtcatcgcgagccagtgaccctctctcacgggtgatccgagtgagctggtacaggaggctgtaggacgtgtcagtggtgccgtcagcgttaagagctgtccggtagtccttctcaatgaggctctcttggatgaccaacttgtggctgcccagtacaggctccagaacgtcgcatatgcgcagttccttctgacccttggacttaacctcagtgatcgcacaagggaacgtagcggtgaccacaggggccagcagcttgatgtacataccatcaccgaagttgccctcaacgacgatctcattgaccttgtgaatcttggcgatgttggccagagcttggagaacagtgtcctcgtagccaccacggaaaccaccagcgtccatcaggaagatgtagccgttgagttggtacagcacagcgtagccggtctcatccttaccacggcccgaggggtcgatcacaaggattttctgagcgtagctcgcagtggcttgaccaacggattcgtagcggtggaagcggtcacctttgagacccaccacaggaacgcccttgcactcgttggaagcgtttggcatccagatgagggtggttggtcccttgtcctgagcaaacgtccctacgatgaagtcacgcagcttgagagggtacttctccatgtcggagaggttcgggttgagcatgaactgaagtgcgaagccacccttgccgtaggacagttcccgctcacgcaggtccttgtcatcgaagcgaacctcgtcagtcggtgcccagaacagggaaccatctgcctgtagctcagcagccagcataggagccagccgtgggccgtaggagtcccagtcagcttggtctttagggtatctcgcaggccagatcgttgtgacgtatccacggccttccagctcgcggtagagtgtcatctcggtctgaggggtgcccagatagatgatcgtaccacccggcttcaggatcgcatcgaactccttcaccagctctccgaggtgatctcgggcggtctgagtggcagagttgttgggaacctcaacgtcgtccgcaatgaggatgtcagcacggctaccagtcaactgaccggtgatacctacagacttcacagagggtgagtggtcgggtttggcaggacccacgtcgaaggcgagagagctgtcacgttgacccggccccggcttcagctcgtgaaggaatgggagaaggtcgatgatgcgcttgatgaacacgctgttggcgtctgcccgttccttggaagcggacacgatcataaatttgaggtctgggttgttccacagcttccacaccacgaaggcgcaggtgatgaaggacttcccgatacctcggaatgcttgaagaataaaacggcgctcgtcaccggcgctcagtttcttggccatgtcgatctggcatttagtcggtttgggtaggttcagtgccctccacaggacaaaaagaaaggccacgaatgaccttttaatcagctccagatcgtcggccccattgcggggtttcgacattacttacctccttgcagtgctcttacggttttctgaaggcccttcacttgggcgtctgctcgttgggcttgctcgataagagctgaagcaaagtcgcttcgtagttcggctcgaccatcagggaggggtctaccgtcgcttgtgacgcaccggacggtcgcatctgcgagttggactgacagcccgatattgcgactgcgaagatcagccacaacgcgatcagcagatgccttgctcgaaccgagatagccttgccattcctttgagatggccgcgatggtttgttgagcttgttcacgttcaacctccagttgtctgttagcggccagtagttccgcttggtgtttgatggtcagtgtgtcggtcgcatcggagtgaccttttgtgtaggccagaccgagggcaccagcagccagaacgactgccagtgcgatctccttgaggcccattagtggcgcactccgtcaccgtacagctcatcctcacccagctcagggaactcgttgagggcagcggccagatcgcccagaagggactcatcgggcttcagcttggcgatggtgaacttgtgacgctcaaggtacttgccgatggcgttgtacagttgaggggaacgacggtcgtcatcacgaaggtcgctcaggagggcacgaccagtctcggtgtcgattgcctccagcagcttttccagaacgttgtcactcatggtgggtctcctttgttcttgcgcttctcatccatgacggtcttgaagaccagcacgaacgtttgcacgatggtgtagaggatgatggtggcgtagaaccaatcgctcaggctcatgcctgccacttggcttgctacttcagcaccagctccagcggcgataggggcagcgcgaaccaccccgttggtgaagtcgatctcaaggccagccatcagctcatcgccttgatctgaacgcgcagagtcttcgcaaggtcgatggtcttctcgtcggcgaggcccagcaggacatcaggccagattttgtcgaactcagcttgcaggtcctcaacggtcacgtctgggcgttcccactcgacgatccccggcatgttagccgcgtgctcgaagatggctgggcagtggtccccaaaggtgtcccaaggacaggccgtgaatgggatcgtttcgactcgaccatctggaaactccacggtgatgtcacagtcgatctgaatgtgctccagagaggtccagcgggggttctgaatgtcgtggacagtcagcattgtgaacttggttggaaagtccataagtcctccttaaagaaggccccgaagggcctgaatggttaggcgtagcgaatccagttagacacgccaccgttgttcgaccagccaaggttccgccacgagccagtaccgccagcgcccgaggggttgttgtgggtcgagtaacgaagtgagccgccaccgagaacagcgttctggacttggtttgcaccagatacgttctgcatggttgctatgcagccgattatgtccgaggtcatcccacccatgtggttgaagatgttcccgttatcagtcaactgccaattcgagccgccgttatttatgtaccagagcttgctgtcagtgttgagccacaggcacccggccacacgaccagcgttgtggaaaccgagacctgccacaccacctccagttccctgaagttgcaggttgcagtttccatacatagagccgtcgatctgggcagttggactgaagaaggttggctgccggttagctggtccacggaatacttcgaggctgttgttaagtacgaggctgttgtcagctcgaacaagaagctcaccactgttgcctgagttcgcacggatgtgcagggccttgtctctatctgcatagatcagcgcacgctcagtcgtaccatcagagtcgcggaaccataggttggcgttggacgaagcatctggagccttaacctgagcaacgctcgtcacgtagagagcgccgccgattgttgcagcaccacccgttgagagagagccagccacggtcagcccagagcccagagttgcggcaccagtgacattgaggccaccggatgtgatcgtcagcttgttcgccatgttggtcacaccagctacctcgaaggtgccagccttgacggcaaccttgtccacggagttaccgtagatgttgtccacccattgagttcccattcggatcgtccaagcgtctctgaatcggacagtagtgccggttacggaatcaatcgaacccatgaaggcgtttgcgttaccgagcttgtcagcctcggtcttcgcacggttggcttcagtcgtcgcacggttggcttcagtcgtcgagaaactcgcagagttcgcagagttggtcgcagaggtctgactcgcagtggcactcgctgccgacttgcggctgtagtggtaggacgaatagagaccagatgcgactacctgatcctcagccttcgaggaccacgcttgggacaagtcacgggcagcggcagaagcatcgcgggcagcctcagaggcaagacgggatgtctgagaggcactcgcagagttcgcagagttcgcagcttgctgttgggccgcaacgaggttctgataggactgttggttgttgaccagcgattgggcgttgttcgtggcagcagcctgagcagatgcagcagcagcttgtgcttggttcaacgcagagccagcccattgtttctgctggcgcaggttgacagcatcaccatcgttcaagccatcggcgaggttgacgatcttacgggcacgggcatcgaggtcaccatcgttgttcacgccgattgtgtcagcggtcaggtcacgggcttcctcagcgatgtgcagagattgaacctgcgagatgttcaggtcgtaggcccgaaggatcgaaccatcagcgaagtccaccagacgctcagttgcagaggtcagtcggcgaatctcgatcaggtcgaagttgtcagccggtccccatgccttggtcgtggtgatggtcgtgttggtggtgaagcggtactcggtgttcaggatcagctcacgtcgagttgcaccgatcaaggtgaccacaacgaacttccgagcgagatactcgaaggggatcgtgaagtctttcttggtgccgtcgagagcgtaggtccgcaccgtctttggtgtagtagccatatcgtctcctttaaaaaaatggcccaccgaagtgagcctttgagggtgccatagtgaggggttttagcgggtgcggtattccatacctgcttcctgcatcatggcgctaagagcacgttgcgagactggatcgtttggcacgaggccacgcagtccattgtaaatgccggtcatatagcccagctcttgggagcggcgagtgtccttccagagaccctcagagttcgcacctacttggtagaccgaaccgaggataccggcacccggaacctgctccagaaggccgctcagtggacgctgaacgccatccgaacggagaggcgagtaacgtactggac

SEQ ID NO: 3 - DNA, 98129 bp, unidentified
  source 1..98129: mol_type = genomic DNA
cccgtgggagtaccacattcgttagaagtaccaatttggctcattagtgttagcggttagcacgcttgactgtctatcaggaaggagggattcgaattccctatgagccgccaaattatagaatgttgctggtgggcaggtcatccctgatatctggcaactgtttctcgtctcgggcacgttatagctcccaatgcccttttcgtatattgatattacccggcctttgtaacgccgtgaacgcagtttgattctgtgatggggcaccaaatagtagcttggccgattggattaggcaagggtctacgaagccctataggtaggttcgatccctacagttactaccaaacaattgccggatagctcaattggtagagcaactgcttgataagcggtaggttgcaggttcaagtcctgctctggcaaccatatatagcgagtaggctaagactgactggtgttgtcacgggcttcataagcccacgcttagaggttcgattcctctactcgctaccaaacatagaacccggccttgtgtcgggttttatcgtgtctgcaatataactagatgaggaatgaacatgatcactcataaaagaggtgatagcttcgatcatcttgccgccattccttctacattcccagacgggtactttgtaggctggactgtaactgcacaggtgaggacggctcaatatggaaaactgttagccgaacttgtttgttcatgggctgaccctgttacaacccgaacactctctgtatcggctgtggatacccaattatgggatatcgggaacgctgaaatggatattcaattcgttcgaaattctgataacaaaaccatcagtaccaataccgtatccatccttgttctcaaggacgtgactcggaggactgcatgaatgacattatcgaactgacgtttacaagcgcttccccaactctggttctcgtccctgtacagccctctgaggctccagcggcgtttagtcaggtattagtaggggccaaaggtgatcccggcactgctggtgacgctgacaacattgaaggttttacaaccaaccctctcttctactacatcctagcgagtaactaaatatgagtctagaaacacaaatcacggcattggtacaagctattggtgcagacattaagacccttcgtacaaaccaaggtgacctcacttctctgacaaccacagcgaagaccaacttggtatcagcactcaacgaagtgaaagcttccatcagtgctggcagtggagcggttatcaacgatgcctcggccaccaacgcaacaaccacaacatactctgcaaacaagatcaacgctgcaatcactgcctctgttgccgctcttgtagcaagctctccaacgactctggacacactcaacgaactggcagcagctctgggtaacgatccacagttcgccacaacgattgccactgccctgtccaaccgtgtacgctttgatgcggcacagacattgacagcaggacaacaacttcaagcatgtcagaacattggtgtaggcgacccaactcacaactgggttacggactacaacacggctaaggcatgagtattgaatctaacatcacccttctcgctcaggcgattgggactgatatcaaaggtcttgtaccaaaggttcaaactccaatctatgctgactctctgaccaacaatacttatactgcgactcttgctgatatcggtaagacgttcttgtggaatggtacagcagacattacgtttgttgtgccaagcagcctgccagatggattcagtatgaaggtgttccagtttgatgctgggaacatcacattggattctggcggcagacagatgtttgccaatggcacagccacaggactgaaggctcagggatcgtctatgaccatcctcacagccacgctgttgattggtggagtgacgcctgtacgtatcctctttgtttcgtatgacagccctctaccaacgttgtggagccaaggaaccagtgatatcacactgacctcaagcacaatgaccaacctgccatctacaacggtaacgcttgacgccaactctgtttatgacgtagacttgcgtctcatgtatacagcagtcaacacaagcgtgggactgaaggtcggatttgccaacctcacaggtggtgcctctgcacagattgactacaggatagccttcaccaacgcttcaggtacggctccatggcgtacaggcttcttgtacggaagcacggccttggcatctggatcggctgttgtaggtgttgcagctgtgaagcttcatgcgtcgatggtaggacggatcaccacaggcagtagccctgtcgtgttgacgcctcaagtgggtttgtctgctaacagcacaacgaacaccattacgattgctgcctctgatgtgtcgatggtttgcaaaaaagttttgtaataggggttgacagatacggtaatcgtgctacaatcaccacataacgaagcaaaagattcaaagaacaccgtgctccccacgggtacagccagatagagtgtgctgtctaaatatagtctctatcagattttattggtactgatctcaccgggcgtgggtccttggctgttaaccaagagatgataggttcgagtcctatagtaccagccaatttaagggtcattgggtcgagcggcgaagaccacgggctgtaaccccgcacaatgatacatcctaggttcgagtcctagatgacccaccaattaggagattgtatgcggcactgtaagacatgtagcacagattatgaggacttcggacagaagcgttctatctgtcgcccatgcaagcaggcatatgatcgagagtaccacaggaaaagaacccctgaagctaggcagcagaagttgtcgttacaggcagaacgggttgtagtggctcgacagtttatatgggactacttgaaagaccatccatgtattgaatgtggagaatctgatccagtcgttctagagtttgatcacattgatcgctcaacaaagtttatggcagtggctgaactggcgacctactctcttgagaagatcagttcagaaattgcgaagtgtcgcgttctatgtgctaattgtcacagacgccacacagccatccagttaggatggtacaaaggaattaatcagtctctggcgtaatagtagcgtattagctttggaagcttagggcggaggagcgtaacctccgggactgaccaatttgggctgtaagaatttcgatagttcacctgccttgcacgcagggaggcggggtttgactccccgacggtccaccaaattataggagcgttaaatgaaagttagaatcagaggaccaaggttggcgatcaccaagcgtaacggtaaacgttgcccatgctgtgatcatctcaactggaagtgtaagttgatggataagcaatcatttaaagaagcacttcaagaagtccacctccgagaggaagattggatttaaagattcaagatgtagtagtggtcccgtgctgtctggatacagtcttccggttgtgacccggttgttggagttcgaatctccagatcaccccaattatgcccttgtagtccaactggtaggagacagctgacttagaatcagtacagtgtgggttcgaatccctctgagggcaccaaatatggcctgttggctgagcgacataggctaccgcctgcaaagcggcaacagagtggtttaactccactacaggcttccaaatatgcgtgattagtgttaacggttagcacgactggcttccacccagtaagttacgattcgagttcgtaatcccgcaccaaatcgtgtaccaatggtacaatgatgttaccgattctggcggtacacaataccagaccaaatttgcttcgttcgtctaatggcaggaccgctgctttacaggcagcagacggaagttcgattctttcacgaagcaccaaacacagacgactgacccaaccacaagtagctacgtgctaccacagacagtctgtcttgtcctgataacccacctcgtgtgggttttctcgttcttatcttttgataaaggaagctttatgaaccttactccaaacgacatgctaaaagctctacagtccatcggactagaaggagttattgcgaatggccttatctcaagtgccggaacaaggccccttcgtcgtaacattgctatctatggcgacagccgtacagccaactgttcaagtggcgctctaccaaacaagatgaccgagaactatggctatgcctcttggcttggtcagtattctgatggtcttatcatgtttgaccctgcatacaactttggtgtaggtggcaacactacagctcaatgggctgcacgtgtcaacactgtcattgccgctccagttgatattgttgtctgcctcatctccaccaatgatcgtacagcagacttcactctggcacaaactcaacagaacattgagtacgttgttactaagctgaaagaagctggtaagattgttgtgttcattgcagaaagcccacgcggtggtgctaacgctctctccgctccaagacaagctatccacgaccaagtacgtgcatggatcaagtcttacctgccaaagcttggtgtgcgtgttgtagacgtttacgacaagcttctggatatctccactgtaactatcgatggcctacactggaacccagttggtgcccgcatcgttggtgaggctgttgccaaagagattaaagacctgttcacctctccagcggctctaccgcgcttctccagccctttcgttaaggcaaccaacccgtttggtcaactcaacaccaacgccctcctgacgggcaccacaggctctaagtctgggtcttccaacacagtaggtgacgtagcaaccggatacactgtttctggcagctcttgggctggtatgaaagttgtggcttccaaagaggttggtacagttggtgagaaacaagtgttcacattctctggtactccaacggccactggctctttgtacacctttgaacagacactcgttctcgacgacgctaaagcagctggctcgctgaaaggtgttgctaacatcgagtttgaaatgactggttgcttgggtgtgtcgcttgatatgcgtgttgctgatggcaccacgttcttcgtgaagtgctgtgaccgttaccaagaaggcttcccaatgtctagtgtgaaagtggatggtgtgcaagaaactccaccagctacaattacagcaactgcgacagaagtaaagattcgtgtggcggtatatggcagccagaacatcccaatgacagggactatcaaggttagtcaactagctgcaattcccgcttgacaagtattttacataaatgttatgcttaggggttgacaaccagcaattccattgtacaataacatacatagagagcaattctctagttcgaaaacagggatgtggcttcggccacgcccttttctaattccaataagaggacaggcaatggctgacgatatggtcttcgatttggaccctaacgtcatcgggccaaagtcgaaaaagcaatatgactttatgcacagtgaagctgacattaccgtattcggtggagcagctggagctggtaaaagttatctgggtgttatggacttccttaaacacatccagtacccaaatttccgtggttgtatggtaagacgtacaactccgcagttgaaaggtccgggcggactccaagagaaagccgaagagctattcaaactacttgatccaaaggtaagatggcgtgacaaagaacaccacttcctcttctctaacggagctaagatttacctccgtcactttgaaaaccctaaagacactgagaacttccaaggttgggaagtaaaccacttccttgttgacgaaggccaacagttcgaagagatgatggttgaatacctcacatctcgtatgcgtaacccaaagtgccctgaagttaaaccccacatgaagatcacctgtaaccctgactatggcagcttcttgcgtcattggttggaatggtggcttgatccagatactggtattcctattccagagagagacggcatgacccgttacttcttgaagcaggacggtaagatggtttggggcgatagtaggacagagttgattgagaagtatggtaagccgcatctatctgctgatcatcaaaaccaagttaaacctctcagcttcaaattcattgcagctaacgtctacgacaaccccgtcctttgtaatgctcaacctgaatatgttggttggctagaaggtcttggccgcgttgagaaagaacgtctactgtatggaagctggctagcacgtgctgaaggcacaggctacttcaaatctcaatggtgcaacatggtaagccagcgtgacattgcttctattaagcgtgttcgtgcatgggatatcagtggctccgttccatctgaaactaatcgtaaccctgactggactgctggtgtcttgatgagccgcaacaagatgggaacttacacagtagaagatgtggttcgtgatcgtcgccgtcatggtggtgtattcgaccttatccttgaaactgcaagacacgatggtgatgatgtgcaaatcattattccatgcgaccccggtgctgccggtaaagcttatgctgcacagttgattagagacttggcagaccatggcttctacgctcgcatgaagcaaacaaacaaatccaaagtcactcgattcgccccatttgctgcaacagctgaagccgggagtgttgagattgttgaggctgattggacgaaggactacttgctggaacttgaacgtttcgacggtagcaagaacattaaggatgaccaagtggacgccacgtccgatgcattccatgcattgtcttctgaacagtatcttcctgacttctcagttccatcaatgacacaggccaacccatttgcattctatagataaggcgaggactcatggctaaaagaaccaagattgaaaaagtcgctgctccaatgccccgtctaagacttggtgaaattggtagtgtaggactcaagcagcacaatggtgctgttgtagaagaaaacagacgtgagcttcgattccctgaagcttgcaaaacattcagaacaatgtcccaagacgctacgatcaagtctgctatctctcttgtagagatgatgattagtcgtgttgattggagtgttgatctgggtgttgaacctgatgcagccatgaaggctcgtggagaattccttgagtctgtcattcatgatatggatcacagctttgatgacttcatccgtgaagtaaccagcatgtacacttacggcttctgtgttaacgaaaaggtttaccgtcgtcgcacatacgaagcagggtcttcttacaatgacaacaagattggcatcaagaagctcccagttcgctcacaggacacaatctctcgttgggtgttcagtgatgacggtcgtgagctagtcggccttgagcagtctctggcgggcgtacagaatggtgatcgttatatcaacctgagtgacaacggcgtcatccagattccacgtaagaaatttatgctgttccgtgtagactcaaagcgtgacaacccagaaggcaacagccctctacgtggttgctacaacgcttggctcttccgcagacagattgaggaacaagaagccattggtattacccgtgatatgaacggtatgccaaccttgtaccttccaccacgctacatgagtgaagacgcatctgatagtgagaaggcaatcttcgaatactacaagaacgttatccgcaacatccaaatgaacgagcaatctggtttgatcttgccacaagcatttgacccagagagccgtcaaccactcttcaagtttgaactgacttccactcaaggtggaaagatgtacgacactgacacaatcatcaaacgttgggacaacaaaatcctgatggtgttgtttgctgacatgttgaagatgggacaggatcaagttggatcatactcacttgctggtgccaaaacaaacattatggcgatggctattgaagcccgcctgaaagagattcaagacgtgctcaacaacgatttgatccctcagctattcgcacttaacggtgagatgctgacagctaaggaacttcctaagttgaaatatggtgatcttgacgaagttgacttggatgaattctctaaagcaattcaacgtatgggtagtgttggtgctcttgaacttgaccgtcctatggcgaacaagattcgtgaatcaatcaaggtaacacctaagaaagacgacgaaccagttgacaaagaagaaatcatgggaggcgaaagccaagcaggtgacggaatggcagcaggtggtggtaatggtgctagctcgaatgcttcgtccagagacaatgctgctgctaacaacgcataggagttgacatatggaatttaccaaaaaggctcttatcgagctgattgagaaacacttcggaggctcgcaagagtctcctgaactaaaggtagaagttaccaagtccctagacgaagaagaccgtaaggccctgttcgttgtccttgagcctgatgttgtagaccttcatggtgatacatacacagctgctgaagtagagaaagcttgtgacaactacaatgaacactgccgtgttgcaaacctcttccaccaagttgtgacagaagaagccaaagttgtacagtcgtttatctctcctgctacgttcacactagacaatggtgttgaagttcagaaaggtacttggctgcaatggtggcagttccctgaaacagaaactggtgaggcgctgtggcaaggtgttaaggctggtgacattaatggtgtctccattggtgctatggcaaccgcagaggaacttgaatgactattgcaaaacgtcgtctaactgatatcagcttccaacatgaaggtgctcacgtagcccttgttggtaagcaccaaggtggccctgctaatggtgtgacaacccttatcaccaaagccaccaatacaatcgaacaagagctgatcgaaaaggctacaacagtaaccgtcgagatgcaattccccgaattccttcgtaagttctttggactgtactgggaagattcagaagttctttcttctgtacttgggtatgggcgtacagagtaccctgactcaaatgaaaaggattggattgactcaagagttgaatctatcaacatcatgaaatcgatctaccgtgctccaaacttggagaaggcacttgctgacctaactccagaacaatcactggctgtcttgaaagatcaagagatgctggaaaaagctctggagtctctgccagaacaaaccaaaatcaaacatgaggacactcaattggaaactatcctgaagtctgcacacatcgaagctctggctgacgctgtagcaatcgaaaaagccgctagtgttgccgctgttaccgaaattcaaaaagcccttgacgctaaagtagaactgctgaaagccgctcaagacaaactggctgaatacgaaactgctgctgccactgctaaagttgaagctcgcaagtctgcacttgctgatgcaaaagtacctgccgaaaaacttgaagctgttctgaaatctctttctgctttggacgacgaagcgtttggtactcaggttgagctgctgaagtctatggcctctgctgttgataactctgacatgatgcaagaagcaggcgtaagcggtgctggtgcagaaacggcagaagaagttgaccgcactaccgcaatccttaaagcccgttacggcgttaagtaatttaccctataggagatttacaaaatggcaacatacgctggtgatgtacaacgtctaagcaactggttggtctacgaagaagaaccagcttcgggcgttactcgcgaagtattgcagaagtctgctgttaacgcaactatcactgggtctgtccttgacagcactggtaagctggtagtagctgcaaccttggccgacgctacttacattcttattgacgacctgacccgtcctgccgctgctgaatactctcgcgtattggtgttggctcgcggtcacgcgaaagtaggtaaagctgcactgatctttggttctgacgttacaagtgacgcacagaagcaaactgtttttgacaaactggcaacaaagaacatctttgctgttgaccagattacctacaacaacatctaatcaggaggactaaatgtctaatcaagtacaattggctaagcaggccgttcgtagttacgccggtaacaacttcgaatacaccgacctgtctgctccactgatgatcatccctaacaactggttccttggaactcagctgggaatcttcggtaaagacacaacttcgcaagagacaatcactttcgaagaaatcacaactggctacggtctgatcaaagacgttcaccgtggtgctcgtcaccaagtgatcagtgatccgactcgccgcatgcacgccttcgcggttccacacttcaccctagacgcttcgatcactccacgtgatatccaaggtaagcgtgctttcggtgttgaccagctggaaaccatcgccgctgttcgtgctcgtaagcttgaagtgatccgtaagagctgggctgcaacacacgaagcagctatctggcacaccatcacaactggtactgcctacgctccaaacggtaacgtcacttacgactggtacgcccagttcggtgcaacccgtgttgaaatcgacttcgaacttaacaccgctacaactgacctgattgccaagactgaacaagtcttctcggctgttcaggacaacgctctcgacggtactgtccgtggtgaagtttgggctgttgcatcgcctgagttcttcgctaagctgatcagtcacccaaccatgaaagctctgtggctggcttaccaacagtctccacaaatccttcgtgaccgtctgcaagcgcgtggctacgatgcccgttaccgtgaattcaccatcggtaacatcacttacatcgaaaaccgtggtatcaacccagacggttctcgccagattccagcgggcgaagtttacttcttcccatcggacgtaggtgacggctacaacttcgtacaatacttcggaccagccgaccactttgacttcgttaacaccgaaggccaagagctgtacgctttcgaatacggagacaaccgtggtcagatgatcgaaatccaaaccgaatccaacttcctgaacgtgcttcgccgtccacagttgatcgttaaaggcgtcgttggcgcttaattgaaatggggcgggcgtttcgcctgcccctttctttgcttaggagcctagaacatgccttacactggatcaccatctacaagtgccactgatcgtatccgtttgaacgtaggtgatatttgggctgatatggagttgcttcacgatgatgactatcagtattttattgataagaacaacggtagcgaaaatcgtgcaacactagacgccgcaagagctttgctgtttgccttgtcacgcttcacacgtgaacgtacaggcgatatcgaagtatatggtggtgacattttcagcaactacttcaaagctttgcaactgattctgaaagacccgaacattgctgtgagtctggctatgccttatgctggtggtatcagtcgagaagacatgcatgctaaccgcatgaacatagacaacaactcagtcatgctttccactgaacgtggtcacttccaacttggttgtggcaactggcagcacaactatgatctgatgtgtcatggtgcaggtggtggacatgggattcagtattaagtttgacaacaaaataccagccctgatgaagaggctggacaaattaaatggtatggaagtcgaagttggtttctttgaagaggacagatacggtcctgagaaccacaacttgcctgtagctactgtagctgcatacaacgaattcggtactgtgcataacccacaaagacctttcatgtacgacacattctccgaaagcatgaaccaattctacatggctaagggcatgaagagtgtattcgaaggtgtcttgaaaggcggaacagccacacaaaggttgttgaactcacttggtcgtctctctggcgaactgatgcaaatcagtatccaacagtatgctgccatgggcggtaactctgttgagactatcagacgtaaaggtggtagagatacgcctcttatcgacacaggcaagatgattgagtctgttagattccacattcaccgttaaggagtaaaacatgagaaatccaccactgctcctaactggacacacgactctcgatgttatccgccgtgaggctgaaacaattatccgtgggcgtcctagccccggagctgagagtatcgtacaggttgtatgcaacgtacagccggtgctgaaatccacagacacctatttgcttcctgaagctgatcgcacacgtgcaacgctcaaagtgtatactcgtggtgatatgttgaggcaaagaaaagaaggagtcaatggctaccaagctgatcgtttctactggaaaggtgagctatacgaagtcatgaaggttattgattacgatatgggtgtgcttaaccactacaaagccttgtgcatgagagtggagcttacctaatgaatatctatcaagacctcgaagactcgctgtacaacattgtgagcaccttgcatcctgattggaatatcctgtttgcgtttactaacgctgctgagccggtcaatccttacctcattattgatgtgaagagattgaacccgattggccgcgagtacacttccaccccaactcgtggtggtgacggaatcaagcttctccaaacaacaacgcaagaccacgaagcaactgttcgatttgagttcatcggtaaatacgatgaccaaacttctgtagctgagatggcccagctgctccagattgagcttagatcaccagcagggtatgaactacaggctgccaacaggctgtcgctgttcaagctctcaacacttcgcaggctgcctcttccgagagacactgacgtgtacatgatctatcagttggactgcacctttgcatatacatcttcgatcacaacagagcaagaatacgctgctggtcttaaaggcgactgcatctaccatgatgcgaaccagcctcctgactatacaatcacgactcaattcgaaataactctacctacctaggagaataacgtatgaccgttcttacggatatcattgaaatcaacatcagcagagaaactgctgccgttgctcaaacaaacttcaacgtgcctctgttcatctctgcccacaccaagtttgcggaaagagcacgctcgtattccagcctcactgccgttgctaatgactttagcccaacagacagtgcctacgttgccgctcaacgtttgttcggccagacactgaaaccatctcagatcgtaattggtcgtcgtctggttccaagctctactgtcaacgtaaaccaagttgctgctggaacatacacactgacaatcaacgaccttccttttggattcgttgcaactggttcaagtacagctatccaagtcgccagcggcctgaaagcagcttacgatgtaactcctatcgacgacgtggctgtcactgacaaccttgacggttctctgactatctcttcttctgttggttactcgcttgaagtaagccctaacatgaaccaagccaaccaaccttcgtttgaatcttgggtaacttcaatcaatgaaatcaccaaagtgaacaactcttggtatgctctgatgattgaatcccacgctgaagccgatgtattggcagtagccggtcaaatcgaaggaatgaagaaagttttcgcaacttcttctcagtctgccgatatcaagacagcagactcaacagatacattctcgaaactggaagcccttggttaccaacgtacctttggtatgtactctgccacagcagatgctcagttcccagaagccgcttgggttggttaccagctgcaagaacaaccgggttctaacacttgggcctacaaagctctgtctggtgttagcgttagttctctgagcgatacagagtccacaaacatccacaacaagtcagcctctacatacgaaagtgttggtggcctgaactcgactatcggagctaagatgttcggtggtgagtggatcgacgtaatcatcttcgttgactggctagaacagcgcatgaaggaacgtctgtggagccgtatggcgaacagcaagaaaatcccttacacagccgcaggtgccgctattatcgaagctgagattcgtgctcagttgaacgatggtgtacgtgtcggtggtctggctcaaagcccagcaccaactgtagaagttccagatgttcttagcctgtctactaacacccgtgctcaacgtatcttcgaaggcatcaagttcgaagcacgccttgccggtgctatccacttcgttaaaatcgcaggaactgtaaccgtttaattacggttacttcctctactaggagactgacaaatggctacacaacgtcttgccacatttgcaccgaatgatgtaagtgtcattattacacaatcgagcacaggcatcgctcacctgatcagcgggtactctgaggactccatcgtaaacatcgaatggacaagcccacgctactctctgtacactggtgccgacaacacaggtacacgtgtcttcaacgcaagtaactctgcgacattgacactcagcctgcaacaaacatctgcatccaacgatgtactctctcagttgttcaacaacgacggtcgtaactctgatggtctattctctgtccaagtgaaagactcttcaggccgttctgtttacttctctgatgatgcttacattggcgtgcgtcctaacgctggttttgctaacagcatgatgacacgtgactgggtgatccaagcgttcaaccttgatggttacgctggtggtaacgcaatcctgactccagaagatcaagctactatcgaaactctcggtggtactatcgctgcgaaatggattcaatcgtaatacattcgttaggggcttccattcgtggcggcccctttctttttatctggaggtactaaatggcaagcctactaaactacgccccgaatgatgtaacgattaccatcgctggtttgtattcagttacaggctatgctgagggtactttcgttcgcatctctaaagacacacaacaaattacaactacacgtgcaatggacggtacaatgtcccgcgtgaagtcgccagacactggctggaaagttgaaatcacacttgctcaatcctctccagcaaacgacattttctctgtgctctggaacgtagacaaggttaccggaatgggtaaattccctatgctcatcaacgatggcagcggtagcacaatgtttatggctgcaacagcttggatcgaagaactgcctgacgtagttttctccagccaaatggaaacccgtacatggcgtttcgcagctacagacgcaacaatcaacattggtggtaacgactttggcggactgagttctatccttggtttgggttctgctgcactgcctgttctcgaagctttccaaatcatttaaggagtatttatgtctggttctgtattgacttatgatccaagcagtgttaccattattgtttgcgggtacatcattccggggatcgtcagcatcaaccttcaatggaagtctgaggtcttcagcctgcacaaaggcattcgaggcgtacacactcgcgtctacaactctgacaggcaagcaacactctgccttgagctgctgcctacttcggtagccaatgacgtcttcacaagcattgtcctgcaagacgctgcaaaccatgcagggttgcttgaagtgcatttgaaagacaccagtggtacatctaggttctcttctacgaatgcctacctacacaccttcccagacctagcgttcaatgctgacggcattatcacacgcaaatgggaaatcgaaattctatcgttcgtaactgcatccggcaacattggtggtaacgcctctaacggtattgacattacggacattctctctggagcgaggtcaagtgctgaaggtcttgtgaacaacggccttgacgcaatctctggttactttagttaaggagcgcctatgaagatatggttcgtctacaaaacaattaatacactgacgggccagttctacgtaggtgttcataaaggcacactggacgataagtaccttgggtctggcaagttattgaagcgtgccatagccttgcatggcagagatatcttcactcgtgaaatcttagcagtctgcgacgacagtgaagatgcttacacgctagagtctctaatcgttgacgaatactttgtcatgagggaagacacgtacaatctggccttgggaggcagaggccgtgacggctgcctaaccactgaagagtctaaagacagaatgcgtaaacccaagagccagcaacacagagctgcgatatcatctggtaagctcggtactaagctctctgatgaacacaaggcagccactgccagaggtcacttaggtttaaagcattcagaagaaacaaagctaagaatgagcatcacacggtccaacaggaagcatgctgttgttgagtgtcctcattgtggtaaaactggaggtgccccggcaatgggtcagtggcactttaataattgtaaacaaataggagaaagataacatggcgataaaacagaaagaagtaatgatcaacggcgaacaatacctgctgactcaactgccgggtatgactggcctgaagctgggcaagcaactgattaagacccttggcccatcctttgcagtgttgcaaggtgaagaagccagtgttgccaaagccctgaacatcctgttcgacaatctagatgacaacgctgaagccttgatcatcgctctggttacctctgcttccaaaggcaatatggcaatcaacttcaacagcgagtttgctggtgagtacgacaagctgttcatgctggtcaaagagattgtggagtttaactacggatcggtttttcagatgctaggttccggcgtcctgtaacatctaacgcggaaccacagatggtgcatcctcggctcaagaaggttgaggaaggctacagccaagactgggaaatcttcaggatcgtgacaagcgaaatcagaggactacccagttacattgagctggataccgtctgcaacgtagaggacatttacaacatcctagagatgcttgatgcaaagtttgagatggatgaagttgcacgtatccaacaagcacaacaggccgctcagaataaataacagtgaggctatatgctacaagaggaaattgctcgcctgacgggtacgttgaagttcaacgttgaagcccgaccactggtagcgtttgagaagagactcggcggcgtcctcgtgatgctgagagagttgtcaacgctcgccaataagaaatttacagtgaaggttgctcttgatagcaggtcgctacgtgctcagattgagcgagcaactaagacaaagatcagcctcacaaacgttgatatttcccaagaagcgcttgcccatcagggtaagcgtattcaggattatctgaataaaacaaccatcagacttgacaacatcagggttgatatcagcaagcttgtagaccagaaacgtctcatcagaacaatgatgggccagatggctatcaagattcctgcaagcgttgaccttacaaagcttgagcgtgaactgcgttctgagcttaatgccgttggtaagcgtcagaagattactgttgaagctcacctcaacgcaactcaattcatcactaaactgcgtcgtgcgttgagacatgcacagactcagattggtgcattgaagattcgtgtggctgatcctcaagttagattgaaagtggacaagcaacacctgattgatgaaatcagagcggcacttgcaggcagtgaattccgtatccgtatcaatgctcgtgacgaagatattcgtagacgtagaaatggtggtggaggcggtggttatggtggtgctgatcgtggcttgagtgccatggcaggcttcgccagaggcgctttaccgggcctaggagctgcgtacgcccttgggcagatgaacgacattaaccagaaggttacggctgctacaaacagcttggaggccgtctcaggtaatgagcagaacttcaactccaacaagaacttcctgaccaacgtttctagagaaatgggtctgaactaccgtgacattgcaccacagttctcaagtatctatcaggccgcttcaccatctattggtgtgaaaggcacacaagatatgttccaaggtatcatgcagtttggtacaacgcatggtatcagcaaagaggctatgaaaggttctttgaccgctcttagccaaatgtttggtaaggacaagattcaggctgaagaagccagacaacagttcgcagaacgtatgcctaacggtatggcgatgcttgctaaagctgctggtaactctggacaaaccaagaacggtacggttgctgaattcagtgaactgatgcagtctggtaaggccgaccctaagaagattcttcctgagttgggcagattgatgaaaaaggcttctgaagataaccaagcttatcagaagtctttggaaacaacccgtgttgctcaaggtcgtatgaacgttgcctttgaagagtctgtaatggtcttcgccaaaggtggtttcgacaaaggaatgggtagcttcttcaatacgcttgctgacagcatgaacagagcacacccattgactgaagctcttggtgctgcatttgaacagctggttaaacctgtaaacgctttgattcgtatcattggtcaccttggtgaaaactggggaatgattgctgataagatgggcatgagcaagaatgcactggcgactttggccgctggtattgcaatcttcatgctgccgttcggtggattcattgtagcccttggtgctgctgctcttgcactggatgacctgctaacttacgcaagtggtggcaagtctgtattcggtgaactggttaaagacacaccgggtgctcaacaagctgtagacaatatcaagcaatccttcactggtattgttgatatgctagacaagtttcttcagaagctggctccagttggtgaaggtttgaaaggactgacattcaacgacatgctgctgacaacactgaagacacttgacgtggtacttaccaacatccttaacacgatgaagttgattgaagctcttactaatggagacggcaatgctgctgatgctgctgcgtctggaatcaacctaacaggtggacgcacgacatataaccgtgccaaagactactttggttggggtcaaggcggtggtagtgaggcatctggcagtggtggtagtgctgacagtggtcccggattctggagtgggctgggagattggttggctgccccggcaagtcaacgtaagagtctggctcagcatttaacctcaagctcgtctatgccgattacaagccaaggtctagctggtagcggtgcggttgatagaggcgcttctccaattacaatcgctccgggtgctatcaccctacaagtttcggtccctgctccagagggtactgacccgaaacaattcgctgataaatttggcccacacatccaagagcttacaaaagctgctgtacgtgatgcgtttggtcaagctagagcacaacaagcagagaggcaataatggctatcgtacttcgaagatcgaacggagacattatctggtttgatgctatcacagagtacactacaacgtactctgcgtctgtcacgaaacatcccatcgctagcggtgggtatgtctctgatcacaccacaacagacaacgtgatcatcaacatcagcggcatcttctctgacgcagactttaacatcactcgacaattgattgaagttagggctgctgacggaactgccgtctccaagaataagcaatacacaaacaacagcatgactgcctatccggtggaaatctacgagcgaacaaccatcaacaggattcttcctgaggttatcgcacagttcaccagagacacaatccctgaggcccttgtaaccgctcaagagaaagccaagacagccatggctgtaaagctcaacttgattgatatgtggagaaccaaggaagagtttcaggtgttggacattgtagataatacagtgattgagcaattcagtccatgcatctttactaacatcacattcagagaagacgctaacactggtgatggtgtgttcccatcaatgactattgaacaggttgtctttaccgacttgcaagagattacggttaaggtcaagacgtccaacaaaggtcgtaagtctgggacaacaacaaccaagaagggtaaggacgctgaagctccaccagagaacacaccgaaggcatacaccaaaatgaatgcgagcgccgctgcgtcttaaagaggactaatcatggtaagtacagtttatgtcgagatgcctctgtactctgatttgaagtaccgctacgggctggccctacaaggtcagtcttggcagttcactttctattggaacacaagatgctctcaatggcatatggatgttagaatggaagaccagacgccaatccttttgggttatgctctggttccgcaatacccgatgtgcgttgactacaacttagaagactacggcctaaccggctacttcttgttgctcccagtcaacgctacaatctcaaacaaaatcactgaagagtctagcatcatgccagagttcttcaaactcttttacgtctataacacggagtaagctaacgctatggcacagaaggatagagtgttctccctgaaaatcggagactataaaacaggaaatggtttgctgattgaaaacccacgtatcaatggtaacagacaacagtttgataacccttggcagattacgtttgatgtttccaaatcggcagacaacaaacgtaacaacggcaactcagcagtcatcgagatttacaacctatccgactcccaaatcaagctccttgaaagtgaataccttgaagtggaattctctgttggttacaaagagtctggtgcccacattctggccatcggaaacgtgacagagacttctacagtcaagagtggtaatgactatgtaacccagctaaagatgggtgaaggctatacggacctcaatcaccagcaactggctaagatggttagtccgggcaagacagttggtgacgtgctggaagagattcgtgctcagatgccgggtgttgctcgtggtgcctatacaggaaccaacctcaacaacccaatcctatttggatggcgtttgaagggcagccctcgtgagatgcttatgaagctctgtgaggcccacaacttggaatacaacatcaactctggcgtactgaacgtctctgaagagaacggtcttctaagcaaggacacagtgcttgcaccagtgttgaacgaacacacaggactaattgacatgccgttccacacctcagaggttggacgcaaacccaagaagtctaagaagcgccgtcgaggcgtacaatttaaagctctactgaacacagacattgttcccggcaagatcgtcaagcttgaatccaaatggatcactggcttctaccgtgttaacactgctcgcttctctggcgactatcgcggaagtgagtggtatgttgaatgcttctgttcagaagttctagcggaggatttggcatgattgcttcagacctgatggatattattcgtacacaattcaagattgatatgtctgacgtctacacagccatgccgtgtaagattgtcaatgtctatcaagacaaccagactcagaaggttgacgttatcccgtctgtgaacaacctgcttaaagatggaactggcgaaccgggtatgcaaatccttggtgtgccaatcatctttccggggagccaagccacactgattagcttccctatcaatgctggtgacacagtgttctgtatcttctcccagcgttctatggacaacttcaagattggttctggtgagcctacaacagccaatgactatcgtaaattctctgaccaagacgctgtagctattcccggcttgttcccattcggtaagagcttgaacaggccacagattcgtaagttccctcactcatcgaacagtgacttgtgtattgcacacaacattgcctctggcacggaagtgaatatcatactgaagcagtctggtgacatgatcgtcaacacagaacaagctgtaactgtcaactgcaagacaggtgtggtcaacgctactgagtcttacacaatcaatacgccacaactgaacatcaatgcagcggtcaccacttgggctggcaacatcgctcacactggtaactacacacagagtggtacatccacattcaacggcattccatttgcaacccacaaacaccttggtgttactgcgggcaatggtacatctggcatcgctacagcataaggactatcatggacttgctactagactcagatacaggcgaccttgttttccaaaacgggtcttgccctgtcacacaacatcaggccgacattgtagcccaaagattaagaatcactctctacacattctacggagagtggttcttgaatgagacaattggcgtgccatacattcaacagattttcaccaaggtgaccaagaagagtacggttgatcttatcttccaagggttgattgctgccgatcccggcgttatcgaaatcctcacattcacttctgaagtgacaccacagcgtgggtacacaatgacattctctgtgcgtgtagctgataacacagcttctctgccaatcactctttctatcggaggctaaatatggctggtctttcccgtcaaggtcttgaaatcaaaacgttggatgacgttctgacagactataaaacaactgctgcatctatcttctctgacttggttcctgctggtgacgttgtagacgtgacagacaactctgctctgggtcgtatgattggtgttgtcgctcctgctgaagcatccctctgggaggccctacagcaagtgtttgacagctttaatcctgcaaccgctatcggtgtggccctagacaacatcatcgccttgagcggcattacacgccttactgcacaggctacacgtgctcaggtaatccttgagggtgacttgaacacaatcgtaagctctccagccggtaaagcttacagctcaagcacacaacgtgtcttcagcatcttgaaccctgtcaccctgaacaccttgcaagcttctggtattggtatttatccgctcacagtggcagatgacacagactacagattcagttacagcactgacggcgttaacttcatcgacgtggtttacacatctggtgcatcgggcacaactgcccagtcgatcatgaacggattgcaacaaagaatcaacaatttgttgtccagcacctttacaacttaccaaagtaatggtagactatacattacaaggactgacccttttcaaatcgctgacttcgacgtcagtatcaaccttcaagtacagaaggtaagaaagcttggcattgctgttgacgacattacaggagcctacccacaagaggctctggcgattgataccatctctgtgcctatctctggatgggacagcgtatcaaaccctgtagaggcgaccacaggccgtctgactgagactgacgaagagcttcgtgaacgttttcgtaacagcaagttctatcaatctcagaacatcattgaaggtatcctcgacgccatcagaaacgttcccggtgttacagatgccatcatctatgagaacgatactgctgaagtcgatatcaacggtgtaccagctcacagcttcttgccaatcgtcttgggtggcctgccatcagatgtggcccaatcaatctgggacaataagccaacaggcattccttctgttggagacaccacagtgcagattgctgacagtcaagggttcctacacaacatttcatacaagcaaccaactaaagttcctgtctacattacgatgcagatcagcgaccttggtggtatgcccggcgatgcaccagcacagatcaaacagaacttggcaaactacttcaatgataacctgttcattggtgacgacgtgatctactctcgtctctacactccaatcaacagtgttggtggtttcgctgtcaactctctgaagattggcacagcacctaatccaactggtatggctaacatccctattggatttgaccaagttgctagtatctctgctgacaacatctccatcaccctagtataatcggaggttacatgtctgaactaaacccgtttgttgaagaagagttcttggatgtggcacgctctcgtgtcactgagcagttcaagaacaagacagtatatgacaaatatctgaagcttcttctctcaggtaaaattgagttgcagaatgtcgtcagagacacaatgcaactacgctccatcgacaccgcaaccggcgctcagttagacactattggtgaaatcgtaggccgtgctcgcggcctcgttacctctgatatcttctactacttcggttttgaaggtgccatccaagctgaatcattctcttccactactgaccctactgttggtggtcagtggtattctctagatgctccgcttggcattagtcgtgctccatctgatgatgagtacagattgatcctcaaagcaaagatcatcaagaacagaacactcgcaagaccagaagatgttatctcagcctacaaattcttgtttggtgcatctcaagttaccattgaagagacagcccctgctgaagttcgtattgggatcggtaagattctgaacaacgtagaacgcggactactctttgaccttggtggtgctggtcaactacttcccaaacctgctggtgtcagttacacatacactgagttccaagcaggcagggtatttgctacagacggattccccggtgcaatgggtactggtgatcttaatgacgccacccaaggcggattcctctctaacctaatcacataaaggaacaaacatggacttgattaaatatgacatgacggatatctgggctgtcgctggagacgttgttgctcctgacgctgagaagattcgtcaaggctggggtgtagaagttgttcctcgtcaatggtggaactggtttgaaaaccgccaagacaacaacattgcctacctactgcaaaagggtatccctgaatgggacgcttatacagaataccaactcaacaagagttatgtacaacgcaacaacacagtctacaaatgcgttaagacaggcgttaaccaagaccctctaacagctacagcctactgggttaaagcctttgttgagtcgtctgctgcactggaagccattcgtggcctagtgcctgatgctgacctcgtgccatactacacaggtgctgacacagcctcgctgatgaaagtcacaccagttgctcgcacactgcttgatgatacttctgttgctgatatgcgtgccacacttggtgctcaaactcttgacgtaactcttacagcgctttccgctgttgacccagacgcaaacacatttgcctacttcacaggatcaacaactgctggttctgctgctctgacacaggttggacgtaacatcttggctgctgccgacgtagcaggtgtccgctctgtacttggccttggtaacgctgctggaatgaacacagggactattgcaggcactgtagctgctggtaacgattcccgtattgtcaacgctcttcagattggtaacaaccttggagaagtgtcggacaaaggcgctgcacgtatcaaccttgggctgggtaacgctgcaactcaaactattactgcaactcaattcgacagcactattggccgcctgttgaagactggcgacttcggtcttggtcaacaaggtgttgtaacaggcaatctgaacgaccttggaggatcaggtacaggcttctataagctggccgctccattcacaggtggtccaactgccggtgcttacactgtaatccatcaatcttacgataacgaacgtactcagctggctttccgtgagggtgaggcatcgccaagaattttcctgcgtaagtatgtaggcggaacaacaagcgcttggcaaccgtgggttgaactctaccacacagggaacacttcctctattgtaagccaagttcaaactggaatccagccaacactggatgccaagcttgataaagctggtggtacggttacaggagttcttaatgtcgctggtgcccttgaagtaggtaacacaacctcgggtaacggttatatcgacttcaagggagttggtggtaacgcagacgtcgatgcacgtattgcggttgatagtggtcaagcaaacaacggactagctggtcgccttctattgtacgcacaatctgtgtttacgaatggaaggctgagtgtacaaaacggtatcgacacaaccactctggccttgtccactccactcccaatcagctcaggtggtacgggagccaataacgctgctcaggcagttgcaaacttgggtgctatgcctgccggtggtaacactggtgttggggcactcttcagttcggttggcgtgcgtagtaccaacgtaaacgccgcagtacaaggcggttacatgatgtggaacgaaagtggtgttggagctacaagcttcatcaacaaccaaggaagtggctcaggtggtttcattttccgtaacgtcaacgcagctaacacagttgaaactggtagggtgacatttggaggtagcggtgaaatttatgccgggaatagtataacttcaagtggtaacattatcgcaaatggaagcctttatgcaggtggaaccggcggtgctatcgtctcgacagatggtaacctctacggtactacatggggcggatggctttcaaactggattaacaactacgttattaccacaagcaacttccgccaacgctttgtggactacatcaatatcgactctatcggctcgttcgctctgatgcagaacctcacaggcactgtcatgcaaactacaagcaactcatcaacttccggtgccaacctgcgattctcatcccagaacacagctggtggtggtgctgcaaacgggacatggagaatcttggggtactgtaacaaccaaggtgttgccatctatcaacgtatcgcttaacaggagtccataatgactgacgaagtagaagtagtaacagaagaaattgtccagcctcctgttgaggctgttgacacaccaatcttcacagaagtaagaaacatcaccatcgtctctgaaggcgtgtacaactgtgaggcgaatcataaagactacggttggattcccttcacagccaacccttcatgcccgcatgatacaacagctcaagcacttgctctgattgataaggcagttaagaaaaggggcttcaagaaagttgaagacccttctgtcaagatcattgctgagtacgatgctcgcgtttggcgtgatggtgagctgagtcgtgctgatgttctaatcaacaaaattgaagacttcgaaatcgaaggagagtctaaaccatggcggcagtatcgtgttgctttgagaaactggcccgctgctgaaggattcccttcggttgagtctcgcccatcggcacctgatgcctaattagaggaaacacaatggctaatatcacaaaaccaattggccttagcaacatctgggctaatggtggtacgaaggttgatccgggtgcgtccaaggtcaatatcggctgggttgtccagcttccaccatacgaataccaaaactgggttgacaaccgtcaagaccaagccattgctcacattagtcagcatggtatccctgaatgggacgcactcactgagtatcaaggactgctgagctacacacaaggaagtgacggactcatctataagtgcctacagacaaacaccaacaaagacccagcgaatgccttgaatagtctgtactggactctggcatttgaaagctacggaagtgttgctgttgtccaatcggccctcgttgcacacatcacaaactatcagacattggctggtattggaaacattgccggtgctcgtgctaacttgtctgtctactccaagcttgaaagtgacacacgctttgcaagtttgaatggtaactcaagtcaagtgtttgctgttggggttgcaactcaacctgaacatgctgtacgcctcggacaagtggcctcactgcttaaccaagcaactgaagcttcttcaggtgttgtgcagattgctacgatggctgaagtcgaggctggtgtcagtgactcgaaggttgtgacgcctctcaagggtgccacggtctacctgaagagaacagccaaccttgcagggcttccaaacgtcccacaagcgcgtttgaaccttggccttggtactatggctactgaggcttcaggatcgttcctgcgagctgcgaacaaccttggtgacattaccaaccaagggcaagcacgtaccaacctcggactcacttcaacagctacccagccagagaactacttcctgagagcggcttacaacctcgctgacttgcctaacccagctgctgcacgtaacagccttggccttgagtcaacagccacaacacctctggcgagcctgatggtaaagtcagacaacctagctggtttgacaaacgttgctcaggcacgtgcaaaccttggactgggtaacatcgttggttacaacattggcgatgttctgcaacgcaacaacaaccttggtgatttggctaacgctcagtccgcaagaaacaacttgggacttgggtcagcggcaacgatgaatgcctatggcgtggttggttctctgaacttcaccagtcagattggagcacagtctgggtttatgagcttccctaacggagtgaagatggcctacgggacattctctgttggtgctgctcgtgctgcaagtgtttatgtttcgttctcaacacaattcagcacaatcttcaatatcaacatcacaccagccaacgctgctaccgatcagttgggctacaactctgtaactggcaacggtatgtacgttcagaagggtactggcgaccctgcggcccgcgagggtatgtggcaagtttggggagtttaatatgatcagtgaacaagcctttgcagcggctgctgctaaactcggagtggaggtggccgctatcaaggccatcgcctctgttgaaacaaaaggtagcgcttggattactccgggcgttcctcaaatcctctacgagagacatatcatggcaaggctactcaaagccaagggtatctctacagtgggtctaccttccgaccttgtgaacacaacaccgggtgggtatggtaagttttcggagcaacacgggaaactggacagggcagtccagattgacagggaatgtgctttgcagtcttgttcttggggcatgttccagctgatgggattcaacttcaaggaatgtggatacacttcgattcaggcttttgtcaacgctatgtataagagtgaagatgaacagttgaatgcattcgtcgggttcatcaacagcaatgcaaaactcaagcaagcactaaggtctaaagactgggctacagttgccaagctttacaatggtgctaactacaaaatcaaccaatacgatagtaaacttgccgcagcatacgtagcctccaaatagtttaaagaactcaggagggttctatgaaaaagaaaaccaaatcaaggacgtccatcatacttggcttcttcgttgtgctgtttctagccatcgaaccgttgatgatgttgtggcagtcagttattccaccgggaacatacgcagctattgctacagtgcttgcagttgttcgcacagggcttaactactacatgacaacaacagctagccaagaagaggatgagcaggaagctgccgaaactggcgtagaagttaaagataaccctatcgtttaagaggtctatatgacctaggagttataatgacgaaatacattatcgccattctgtttgcacttgtagtctctttgtttggaaccagctaccactaccgtagcgaagttaagaaattagaagctgcgacagtggtgctggaacagaacgtacaaacatggaaggatagaacgcaggaagcgattgaccgtgaagtgctggctaacacacgttgcactatcagccaacaaaaggttgaagtcgtaacagaggcgaatgaatcacttgaagagtcaaagaacttgacactgagagaactcgccaaacagccgcatgaccaattactggagacaatcatagatgctaaccaaaagcctaaaacagtggctgatgatgctcgcctttctgctgacattatgcgcatgctcaacagtgcgtactgtgctggagccaaagacgatagttattgcacccccagcggaactcctgcgaaactgccagccagcaagagtaagtgacaataaagtcaaaaccttggtggaggcaaacatcattaacaccactgaaatctacaagtgcaacaaccgcctgaatgctattgcagattactacaagcagcaggcggaagttggaaaggagactaaacaatgatgcaaactatactaagttgggtagcgggagctgtcctgacagttatgatggccgttgtcagtttccagcaaacccaaatcagtcaaaacgaaaacagaatctacgccctccaaaaagagagtgtgtccgaggctaaactcaaagacatggaagagaggatgcaaagcaacttcaactctagattcgaaggtattcgacttgagattgctctgacaaacaaatatctagaaaggattcttgaggacaccagagggaagaggtaataccttattggaggctgtaatgacaagagaacgcaactacccgctgttgtcagcagtagcagcattgtttatctgtcttcttgtctgtatcggtcttctcgcaagcggtacattctctagaagtaacgtagacggcagacttgctgtctatgagcaaaactatagaatggatatttctaggttggaaagaaattatgagattaaactcaaccgcttggaggaacagctaaactctaacgagtttgtaagtagaaaaaggatagaactacttgaagatgatattagaagaaacaaactggatatacaagcaattcacgaaaagctgaaagcccgctcaccttgacaggcggcgggcaatcagaacaaattacaaaggagtggggatgaagtattacgtgtatgttgtaaagataggagacgagattgtctatatcggcaagggaagtggcgctcgatttgagcatgtcaactcaggtacaagccataactacttcttgaacaaggcacacttcgaaggtattgccatggatgtgagcatagccttcaggtttgagactgacttagaagctacactgaaggagtcggagcttatatcggagcacaagcctaagtggaactatattggtaatccaacaaaggtgaggcgaagaagttccaacagacgaaaacccggtgcaggtgtgatgtactacgaaggaaagccaaagccgtggagagcttatatgcataaggacggcaagaagaagcatatcggttactacgacacagaagaagaagcaattgaagcccgctcatcctatatctaaggaaggcgggctttttgttgtcagaagattattcctccttcagcaagtaggcattgctaatcactttgaacgagaagtcacgcttggtgctcttgtagacgaagccctcacggtacttacctttcaaaccacttggaccatcagcacgtgcaatcgcctcagccactgtgacagccttcagagggccagtgtagttgactgggacatgcacaacaccttggtcagagcagaagtccagacgctcttgtgggagcatgtagcgttgctcatcaatcaggtacacatcgtagcagaagaacttgttggaatctacaccctcaaagtttttctggatcgacggaccaaccatctcaccttgaatggcgaggttacggccatcacgcttgatagcttcaatcagaccagcttcttcagccatctgtgtgaatgcgttatcgtctttcttgataacacgcttccactctttgtggatcagaggacgacgactcaggaaccagttcttgacagcagtccagaacggaaccttctcatcttccatacggaagccaacgttacgagaggcaacaccagctacaccgtccttgacccaagcagtgagtgagctaccgtcaagcttgaaagactcttcaaactcttcaccttcggacacagccttgaggtacatggcagagatgttctgcacacgggtttggtcagtctttggaatgaactttgggaagcccagagcagacttgccagtcttcacaccaacaccgccagtgttgttcatgtccttttcttcagacttctcgtacttgagaacgcccagagctttggtaaggtctgcaccaagctcggtatcctcaggaatgccagtctcagatagaggaatgcagaaaccctgagagagctgcttacgaagcttcatggttttgatacgtgcgtgcgtacggccatcaacaacgtgaagaagcttgctcgacaggccgctcagcgagctgaagtaaggtcgctcagtatcaagcagggagtccacttcaaagtagacagcctttgtgatgttgggcacatacaaacccttctgtacaacaacctgccagccaccaatgatagccagttcgatacggtcagcgccttcaatggcaatcagttcgtcaattgtcacaacacgggcaagggaacgctcagacatataaatctcctaaaatttgagtcgtaaaaatgcccccgttaccgagggctatttgagtattaccggccttgcagagcagacagcaactcaaggataagacgctcttcatcgctcacagactcatagaatgtctcacgaatcttgtcttgatcggaaaccagttccgaggtgactgccttgatgtgggccagacctgccattgcaaagtcttcttgctcacgcagcttgaggtcagccacgaggccaatcgactcatctaccagagcggtaacttccaacaggttggcaagcgaatcagccaactcaccaaccaaatccatcaacacatcgtcccgtacttgcaggtgctccaaacgcttagcgatgttcataccagcgattacagcagcagcgatagtaactttactcattttgtttctcctttgtgtgttttgaggtggcttagtctacagtgtttcagaatcttgtcaagcggttagtcgaatttaattttacgaccgccaatcgaaaggctcttgatggtttcagtgttcacgttacggaactgctcacggcctttctcatctttcgagttcagcacgatggtgacatacttctcatagtgagatgtggtgttgcgaccatcttgacccttcaccttacgaacgtgaccgttcagagtccgctcagtgccgtcagccttgacgaaggtcacgccgaagaatttgctaccgtttgcacgaatcattgcagcgatttgcttggatacggcgtcagtctttacagtgttcatgtttgtttcctcgtttgttggtgtggagccagaatatacgaaatccgaaacgagtcaaccctcttgacaagaaaaatttgtggtgtatcattcatcacgtcgcagagagatatgtcgggtcgaaagacctccctcaccgtcctgcgagtgtacgccctatgaagaggtaagctgttaggggcacctgaggttgaatgtgggaacaggacagcggactctatcatagaggaaggaccacaatctatagcagcccatgctgccgacttgcgatcccaattttggatagcatagagataaacctgtaggcacgtctcaggctgatgttgatcagtatggcgagccttgggattggtttatctcgacaatacgaaacccattttggataggagcaagatatgtgccatgtggtgaatataaggaagatcaataggaatgaccctgatgtggtgtacataggaagaggtagtatctggggtaacccgtacagccataaagaaggtacgaaggccgaatatgtggttgcctctgtcgctgaggcaatagaagcctacaggaattggttgtggaagcagataaaggaaggctcaatcacaattaaaatgttgaaagagcttgacgggaagcgcctcgcttgctattgtgctcccaatccctgtcatgggaatgttatcaagagagctgtccgatgggcaaaggagcaatgaaatgaaaaagattgtactgatgggtttgctgtgtggcgttttgatgggttgtgagggccggttgtcacttaatgagtccaacataagaaagaccgtgtgccattccaaaggcggtgagtacatcgtctacatgggcagtgacggaaagtcggcaaggggttcgacctgtaaggttgacggagtggaatacagattctggtactcacgcggcactggcagcaacccacaactctgaggactgaagcatggaaccatgggtaaacaactggcctaagtacaaagaagaacgcgataagatgaaggaaagagccgattgcgttgtagtgtccttctgtgaggtttggggtgctccttaccaagctgcacacactcacatcaagaagatgtttggacgccgtaaccgtcgaggcacggacactgacaattgccgtgacgccattgcacggtgcccaaagacaaggatgactggccgtcagtatggtgacgttgacaagcctacgcttgcacagttctgtaagaaccatcctgaaggccgctactgggtctttgtggctggacacgctcttgcagtgattgatggtgtggtgcatgatcacaaatacggccctcgccgtaaggtcaagtttgctttcagggtgtatccgtagcaatgaaattcttcttaggactggtgctgtttgctgtggcaatgtttggaagcctgttcatcgtaagagtaaatcacttcgatgatcacaaaatggcttgcattcggtcaggtggtaatggtaaggtgcttgtcagttcagtgggtgtgcccattggttatgagtgtatgagaatgcacttggtcatgaaatacagaaatggagaatacaaatgactcaggaattgttgcacgcatttacacagcttcggatcagtgaacgtcaggctgtactggcagacctcaactacagcatgcagccagcacagaaagagacgtgccttgacttctgtacgcgagtatgccgtcaggtgagcagcgatggccgggttcgtgatcttgaatttgcaatgatgaggtttcaataatggctatcgagattaccaagattggacagctgccagccaagcggaagtacacaggcaagtgtgccacctgcaagagcgagtatcgtgccgaacagggagacttgacatatgattctgattttcatgaatctttttactggacctcttgccagctgtgcgagaaccgtgtatacttctaccctgaaacgaaataaggaggttttatgaacagtggtattcagctggacgagttgtttgaagcacgtaaccccaatcttgtcaaggagttctttggtgactccagctggcgtattctgcctgtggacgccaaaccagaagacaagtttgttgctgagatggtgtttgagcgtcttgacaatgagatgttccccggcagcactgtggcccatgggttcatctacaacgactcgcgaggcatcttcctcgacggcgaccgtgtgcgcacgtccactgtgaagcagatcgtcgagattgacggtgacacgtacatcgaaacacgaaatacaatgtacaaactggttgacaaaggctgaaaagctgctacaatgaccaaataaaatatcaaaggagaagattatgacacagatttccatcactcgcgctttggctgaaatcaaatcgctgaacgaccgtattgaaaaggcaactcgccaatcggtattcgcaactgtaactgttggtggcaagactaccaatggctctgacctgcaaaccacaaccaacactctgaaggccaaccttcagtctgttcaagacctgattgcacgtcgccaagcagttaaggctgccatcatccgttcgaacgctgtgacttcggtcaccatcaatggcgtagagctgactgtggctgaggccatcgagcgtaagggtagcatcgacaaagagcgtgctcttatgtccgtcctgcaacagcagcttggtcaagtccgttcggttgtagagcgtaacaacgctcagatgcaacaacgaatcgacaccatgattcagacagctgttggcaaggagcgtaaggccactgaagacgagctggaggccatcagcaagccttacacagcttcgaacatcacaaccccactcgaccctaacgggcttgagaaggtgattctggacatggaagcggccatcaatggcttcctgtttgaagtggattttgttctgtcggaatccaacgctaagactctgatcgaggcgtaacaagtttctcatgctgcgacgaattgcctaaattcacgcaacccattgctcgggggtatatccgagcagcctattattgaatggtatttcaacctaatctaagcatagattgcccgccaaccttgggcagactcgcattgactaagttcaaagatcagtctttaaaggtgcaaagatgaaagatcatgccgttggcaattcagtcttttaaatttgtaaagtatacagctaaaagcttctccaaatcttggatacacgttgcgacgtatctgcgtgacggacgctggcaatgcaccgagctgtcgtaagcatgaacccaatctgacccttgagccctctggcttgagggtctttttgtttgtgagggttgacaaacgccgataagggtgtagaatccacacaatcaacaacggaggacgtaggatgcagcagttcaacaatcagctagtgataggccagaagtgcatgatcataggcgtcagacaaccacagaacgcattcctgatcgggactgtggtaacccttgaggatatttgggaagctgatcaggacgtaacaagcttctatttaggtgcggaacaaggcagttctagagtcattgtcaacgcggataggactgctgtcgtgtctggttgccgtgtcacgggagggacactatctggagaatatcaaatggaaaagggttggacaaacttcaacctaaactacctaatgcctattccacctctggaagaggaagagcttcaacgtgagaaggagttgtcactggtatgattactgaaggccaaatcctcaatatgtgtgacgagcttgagaagcgtgtaagactgcgtgacaagagcttcactgttcgtgtacaatccgcccaaggtcttcacgggcctttgtatctggtacacatcgagaatgctacaagctctgaccattacgtggttgacgcagcactccatcaatggatacgagagattaggtgatggacaagatacgcaacccactggcagggcctaaccgccgtgtcaacgttccgaaggttgaacgtgaccgtaccaagtaccgtcgcaaacgtaagcataagaaaggagagaacgaatgaaagtaggtgatcgtgtggaagttgttagtgatggtcgcgatgactatgatgcctctgatgataatctgattggttggactggtgtaatcaccaaggtgtggcctgacggcgctgtctgtgtcgatcttgacccagaacaagacccagagtgcgacctgacgggtcttgcattcgaagcacgtgaagttgaggtgattgcatgaaacctcaagacctgaagccgccaaccttgaatggcaacattctgatgctcaacattctgggattgcacaacgtcatgacgttcgtccagcagtcgaagagcctgcaattctctgtacgtccagaggacaatggtagtttgattctgtcggtgccaatcaccaaagagtttgaggacaagtatgttggcatgctacatggtgccagagcacgtgctaaggacaaagagaagccggaccctaagccaccaacaggcggcggcgatggaaccccaccaagcggtggtacaccgggcactccagtgcttgacacatacacatttacggaggccagagcagcttgaccagtttgacttactcagctgatagcccttctggcctgtttagaggtataaaggtagctggctacaaacacagaagtggttactgggtagtcagacacagaggggttaagtattacgcgcacagactcgtgtggcttcttcttgtagggccaattgaggaaggctttgagattgaccacatagatggcaataaagagaataactcgatcgataaccttaggaaggttacacataccgtaaatatgcgaaaccttcccatgccagcctctaacagctcaggtgaaacatgcgtctttaaaaggacggtaaagggtttcgactactggattgcacgatggagggaaaatgggaaaaccaaggaacggcacttctcttgtaataaatatggcgaagacgtagcgaagtccttggcaagtgagcttagaaaggatatgctgtgcgtaccttccgagggttatacagataggcatgggaggaaagagtgaatagtctagatattgctgagaagtatggaattgacctgtacacatacgggaaggtgggttgtcctaagtgtatagagaagggtggagacagatcgcaagacaatcttatggtctacgggactgatgacgttggacggcataaaggtgctcattgctttggagggtgtggtggcttcactattccatctgaagaatggcttgaagagaatggcgttgtagaagaaaaggagtacagtgttttgggtgctgagtttaacgatgagattcacaacaaaatgaaggaaatcaccacgaccgactctaagggttatcgtgggattcgcaaagacacgactacagcgtttggtgttcgccatgaagtgaatactcaaactggtgatatcgctgtccagtattacccttgcacgatggaagctgacaacgatcatgggtttgtcctgacaggctacaaaaagcgcacactgcctaaagacttccgtggtcctctgggcgagacgggcaaagagtgtatgctgtttggtcagttcaagtttgtccgtgaccgtggcaaatactgcttgatcgtaggtggtgaggttgaccagctgtccgcgttccagatgctgtctgattaccagaagaccaagggctatgacccaatccctgtagtgtctcctacgattggtgagacaggctgtgagaagcagattgtaggccagtatgagtggttcaaccgctttgagaagatcatcgtctgtatggacaatgacgctgctggacgtgaagccgctgagaaggtgtgtaaagcactgccgaagggcaaagcgttcatcatggaaatgggcctcaaagacccgaactgctacatctgggatgcacagaagcaacaggccagcaacaaagagcgtgagtttatctctgccttctacaaggcggctccttacactccaagtggtattgttggttctggtagcctgatgaagttgatgaaagctgctgctgtgacaccaaagattccattgccgccattcatgcacaaagtgcaaaagatgatggctggtggtatcatgctcaagacgatcaccaacttgggttcggcgtctggtacaggcaagtccacgattgtagacgaatgtgtctaccactggattttccacagtccacacaagccgggtgttctgtcgcttgagagtgactgtgctcagtacggtaacaagatgctgtcgcgtcacatcggcaagaagcttgacctgatcgaagatgaccagtacaagattgacctgctgaacagcgctgaggtggaagccaaggcccaagagttgttcttcctgcctgacggctcgcaccgctggcacttggttgaagaacgtgacggatcgattgaggatatcaaagagaagatcatgcaactgatcgtcgcttgtgagtgtaaggtgatcatcatcgacccactgcaagacattctcgacggtatgagcaacgaagagcaggctgtctttatgaagtggctcaaaggtactgtgaagagtcatgatgtttctttcatcctgatcaaccacgtgcgtaagagtgcaaacggtgccaagcaaaactcggcaggtgcagacctgtttgaagaagacttccaagggtcgtctgccatcttcaagagtgctgcctgtaacctgttgttcacacgtaacaaggaagctgagaacgaggtggagcgtaacgtcaccagtatgaagatgaccaagtgccgctggacaggtaacacaagtcctaacgctgggaaatacttctacgacaacgctactcacacgctgcatgatctggacgattaccttgaacggaatccgagagccaaggcagagtatgagatgcgggaccaaggaggtgatgatgatagtcgaggcagcccgaaacgtggtttgtctgagaagggttgggttgtatacgagccacagtattaagtaggttgacaaggggatggtgcttcggtatcatccctttagtcgttttagggagaggaacaatgaagcaaattacaaactggaggcaagcgagtattgccgactttgaggcagacaacctgctgcacggcgtaaccaagatgcacgtcatgtcttaccagattcgggagatgaatggcgagctgtccaaggtattcaccattcgccgtgacgatgcaaactatgaagagcgtgttgcaaagttcttcaaataccacattgacaagaacattcctgttgtgatgcacaacggtattggctatgacgttcgcatggttgagaaggttctgaaactcgacctgtcaaagctgatggtgattgatacgctcgcactgtcgtggtatctgagtcctgatcgtaacatgcatggtctggacagcttctttgaagactacggcatcgccaagcctccagtctctgactgggaacagggtgaagatcaatcactgaaagatttccttgacgtgatgcagaaccgctgtcaggaagacgtgaagatcaacacggctctgtggctagaccacatggaacgtctgaccgacatgtacacaaaggctcaagacctgattgataatggtcagcgagttgaggacaagaacgggaacgtgacgatcacccgcgtgggcggtacacgtatttctgctgatgagtggattcctatcgatgacatggttggccgtaaggttgatcaggccattgacagcattctcacattcctgatgttcaagatggactgtgccgctctgcaagagataacccgttggatggttgacctcgaccattgccgtgagtctctggataagctggaagcaatcgtactggaagcccgtcaaggcttgattgctgtcatgccaaaggtgtcgaagtatgccaagaagacagagccaaagattgacccattcaagaagaatggtgaccgagctgcacactggattaaatgggacgaaactctaaagcaacttgagtctggtgaagttgacccagagactggcaaacctctggtgtacattgacccagaagacaagccagttgatggtaagcaagtttaccgagtgtggaacaagaacgaagagcctaatccgggcagtcctgctcaggttaaagacttcctgttctccaagggttgggtgcctcagtccttcaaatacgagaaggatgaagtagcattcaacgcatggattgccagcaagcctcaaggcaaagccacgcaccaacaatgggaacgctggaagaacagccgtcctgaggaacgtgcaatcccacaaatctctgtgggtggtgatgatggtaaggagctgtgtcactcgctcacagagcttgctgaagaggttccagcgattaaggtgtacgctgactacaaggtggcagagaaccgccgtaacatgcttctgggcttcttcagggacatggaagatggacagtggctgaaggctcgcattggtgggtttacaaacacccttcgagtgaaacaccgtgaactggtaaaccttccgggcgttgacaagccttatgggtacgacattcgtgggagtttgattgctggcttcaggaagatattggtaggctctgacatgtcctcgcttgaggatcgtgtgaagcaccacttcatgttgcctcatgaccctgagtacgtagcaacaatgcaggctgatgacttcgacccgcacgtcctcatggctctcattgctaagatgattgatgagtatgagttcaacgaatataagcggctgaagaagctgccaaaggatgagctgacaaaggctgacaaagagttgttgggccgtgttggtgcagcacgtaagaagggtaagaccacaaactatgcttccgtgtacaacgctggtgcggctaagattgctcaagcggctggtgtggagcttgaagaaggtcaaatcctgcacaaggcttactgggaactgaactggtctgtgaaggccattgcagatgaacaggtggtgttcaaggacagtcgtggtgacaagtggctgatcaacccaatcaacgggttctgctacagcttgcgtaaagagtctgaccgattctctactctggcacagggaacaggctcgttcttctttgacatgtgggttgacaacatcctcacagcaatggaagctgtgtttggccgtaagacgctctcaggatcgttccacgacgaatgcatcatctgcatgggcgacagccctaagaaccgtgagacgattgctaagatcatcaaggaggctgtgcagaaggtgaacaaggattacaaccttcgccgtaagctggactgtgaaacacaatttgggcaaagatattcggatattcactaaggtgttgacaacggggcaaggaagccccataatcgccacacacaaacaaaggaggcaacaaatgcgtaagggtctactgttgggaacgttcgttctgtcttgtgcagccatgctcactggttgcttcgaacagccgaagaaaattggtgaaagggtcttgacaatgcaagtgacaagcgtatacttgaccagcaagagcaacagcaaggtaacgctcaaagacgtcaagactggcaaggtttacaaagatgagcgcctgtcttgttcacgtgagaaggccaagaaggttgaaatcggtagcctgtggactgttcatgaggtagattatgtctacccagagagcaagcgctatttcagtgatctggttggaactgctgcaatctgcaccaaaagcaactactaattcataaaaggagaacaccatgactactcgtaccgaaccatccgtaggcaccaccaattcccaattcgcactgtctgacctgttcggcggtaagaaaggcaaaacccctgacgctctggctaacgaagctctgcaagctttcactgatgcacaggccaagctggaacaagcccaagcggctatcgctgtccagaaggctgagcacgaagcagagattgctgcccgtcaacgtcaactggctgtagctgatgagcatcactcccgtctggagcgcgtcaagaaccgtttcgcggagctgctggcatgatcactaaaggcactgaagtgcgagtcatcacagggcctgaaggctgccacaacttcgcaaaagggagtattgtagtcttcaacggaaatgatttggggattctgaaaggattcgtaggagaggacgaagaaggcgaactcattcagtaccttgacgaagatgactatgagattctataaggtagtcagcaaaagcaactaccacatgtacgctctgggtgaaatcgtagaacgtatcagcgccggggcaatcctcggcgctcacctctatgtcaacgacaagggtatcaaacaaaggcttcatgaagatgaggttgaattagtggttgacacccaagaaaaaccagagtaagatacgcattctatacacgaaggaggtacatctgtgaaaataggtacaaaggtaagagttatcaatgaaggtaatcgcgctgagcgtcatggtttcgatgtgggagccgtggttactagcgaaggcgatagcttccttcatggtatgaaagtttgggagttgtttgttgatgagacaggcttcagtcaatacctgctgccagaacactacgaaatcatctctgacaccaaagctgtcgagaaagtagttgacagcgaactaccaactaaggtagtatacgccgtcctgaatgccaaggacgaagtgtatgcaaccactgatgatcgggattatgcccgtgaaatcaaatctgcattgggtggcaagcgtaaggggattcgtatcttccaatgctctgcaaccaaagagattcgctaactgatcattagcgttaacgaggtcaagtgacctcacattgcccaataatgggttctagataggagatataagatgactgcttttacttttgtaacaactaccacaactcagaacgctggtggcgagcgccgtgaagtggattgggatggcctgaacaagcacgtgattgagatggctaagacccaagacaaacctcgctcgattcccggcgtcattgctggtatcatcgacctcggtgaacagaatctggaagacgctgaacaggtgttcactggttctgccgctgatgaagaaaaggccatcgctgaaaagcctgcgacctacttcaaggatggtttcgatgagaagggtaagcctgcacgtctgaagtgctggccgcaaaagccagtgcagcaaatggccgctatgatcgacttccctcagatcatggttgacaagggtaagttcttcggcaacagcaacccgcaaccactgcgcgttctgctgaaccgtgaattcactctgccgggtgacaagaccaagatcgttgcttcgccatacaacattcgtgaaacaaagcacgatatcggcggtggcaaaactacttgggcgttcgccaagaacaacggtctgcacaagctggcagatgctgttggtatcttggacaagaacggtctgttcaccaaagatcgtattggtgagttggttggtaaagtggctcagttccaagtgcaagtgttcatgaagccgggtaaaaacggtggtgagttcttcactgagaacgttaagctggttggtatggttccagaaggcatcccactgccagaagctccagaaggcactctgcacctcgttaacctgttcgcagctaacgacccagaagccatcaagcaactgcgtgtggcggtcaagaaccacatcaagcgtgctaacaactacgaaggctcggtgctgaagaccgaactggaagcgttggaaggtaaccgtggcgagcaagctgcaccaaaagaggctgcaaagccagctggtgtaactccaagcaagccagcacctgctgatgacgatgacaactttgacgacgatgttccgttctaagagttgacaccaaagggcacagcttgtatagtgtgccctcactattttctaaggagcgataaatgaacctgttctggtttatcttctgggtctgcgttgtcgttgactgtgttgtaccgggcgtcaacatcgctctgggttggtacttcctgtggggctttcttggcctgcttacatctcaataaaggagagaaaatgacaaatccaaatgctgtacaaatcgtattcgtgattgatgaatctggctctatggctagtcttcgtcaagatgtaattggtggtttcaataccctgattgctgatcaacgtaaagtggctggtgtcgctgacgttaccctctacaccttctctaaccaagttaatcttgtccttgatgctgtcgcactggatcaagttgaagacctgaccgaagcgctgtatcagccgggtggtatgaccgccatgaatgatgcaattggtactgctcttgccaaggtgttgaaagacaaccctgaaaaggcaatcatcaacatcttcactgacggttatgaaaacgcctcgcgtgagtacaacgctgtcaaggtgaaagagcttgtcaaacaagctgaagagaaaggctaccaagttgtgttccttgctgccaacattgatgagattcaagttgcctccacatttggccttgccgctggtgcaaccatgaacttcatggctgacgcacagggaatggagaacgcctacctgcgggcttcctcatctaccatggcttaccgtacagggggtgttcaatgactgaatttgaactgtttgacaagtttgtaactgaagagttgaactctctggcacaaaaagaagacgttaagaaaatcaaagaagacgcaaaggctgtaggcttcgataagaaggctatcgcacttctacaagcctcagcaaagctccacgtagctgacgcctttgatgagcgcacagaagctcagcgtgagcttgaagagacttacatccgagtcactggccgcaaaggtaaggttgattcagcgtactgattgaacaatttggggcttcgtgccccattttgctatctggaggaaacataatggcaggagagattctagtatttgacgcagacagtattgcttacaaggcagcagcggcaaacgaaacaaagagcattacatcccaacacattgagaagggtgtgattgagcactgggataaccgtacagcgttccgagcttacatcaaggacacggaacacactgaggatatgtacaccatcacggacgtgcaagaggcccgtcactcaagctacggcaagaccttgattcgggagatgatcaaaggctaccagaacagaacagggatcaccgcacatgagatttacattggtggtgagaacaacttccgagacactattgaacttccaatgactcatgttgccacagtaggtaagtgggcaggccagagtaagttaggcgggaagtacaaagagaacagggaagacaccattcgccctttgcagctgagagagctgagagcgttcatgattagcgagttgggtgcaatcgtgatcaacggtatggaagtggatgacaaatcctctattcgtgcatacgaaggctttaagagtgagactaagattatccaagtgacggaagacaaagacgccctgcaatgcagtggttggctctggaaccctcagaagatgatcaagcctgtactcattaaaggctttggagagctgcacaaggagggtaaaggcatcaagggtactggtcgtatgtggctctactaccaagcgctctacggcgactctgtggacaactaccatgggtgtgacctctggaagattgcacaggacaaagcaggtaagagtgtgacgtttggtgaagtggcagcgtacaacattctcaaggatgcgaaaggcgataaggaagcgctacaggcggtttacaaccaatacaaagcgtggtatcctgagccggttacgtacatggaccatcatggagtgatggtgaccaaagacgccttgcagattatgcagatgtactttgactgtgcccacatgagacgctgggaagatgaccgcatcgacgtagctgccatgcttgataagctgggtgtggtttgatgaatgatttcaagccttgggttgagtattcgcacatctggaaaactgaggcaatgtacttgagctggattcgtggcggaatccggcgttacctctggagcaagaaccctgtcaaactggagtttgtcaaggaagcccgcaagatgattaccaacccaaacgtgaagctgcgtaaaggcaggccaaaggtttggggcggcgtctgtgagatttgcaacaaagaacacatcctgaagaacatggaagtggaccacaagacaggcgagcactcgctgaagaatgtgagtgacgtacagaagtttgtggaagggattgtcttcgttcgtaaggaagaccttgcattcctgtgcaagccatgccacaagataaaaacccttgccgagcgtaatggtatgtcccatgaagatgcagcaatcgagaaacaggcaattatcatttgcaaagggacagcgaatgaggtaaaatcgtggatcatcgaaagaggtgaaactcctgcacgtctagtgaaagaaaggcgtgagcaggtgacaagactattgaaggagggtaagtaatgtgggaacgttctgagaaacacctagtgctggcactgctgtttggtattgctgcacaacccatgacagggttcttcgccggtctgggcgtcgtaatcagtgttgtacactgcgcgtttagcctgtactacacattcaaagaaggtaaagagaataaggaggatttgaagtgagtaagaagcgccacctgatcgtagcagacacccagtgtaagccgggtacatcgttggactacttgagccatattggcgagtacattgcagagaagaagccagacgtgattgtccacattggcgaccactttgactttgagtctctgagttcgtatgacaagggaaagaaagccatggagggtcgtcgccttgtacttgatatcgaagctggcatggaaggcatgcgtcgtctcactgacccgattaaacgcctgcaagagcaacagagagcaaacaagaagaaggtgtatagccctcgcatggtattctgtacaggcaaccacgaagatcgctttgaccggatggcaaacgataatccagagcttgacggttttgtgggtactgccacacttaatctagagcagttcggttgggaagtgtttccattcctgaagcctgtagcgattgatggcatccattacgttcactacttgatgaacccgatgaatggtcgtcctcgtgctggtaacgccgctgcacagatcaaggctgttggtggatcgtttgttgttggtcacaagcaggtgctggatatcgccattgctgacaaccaacttgacggcaagtatcgcattggtattatcaatggtgcgtgctaccctcacgatgaagcctacaaaggctaccaaggcaaccaacacttccgtggtttgatggtgttgaacgaggtgcatgatggatttggtcttccgatgcctatctctctggattacctcaaagagcgttacactgcttgacatagaatcggggctatcgtatgatggcccttcattcgtttaggagggcttatggctcagagtaagaaacagtctctcaaggagacgatgaccaatacaggcgttggcatggtgggaagctggctcattacgatgggttgcctgtccctctggtcgaatccaatggtttctgcaactgtcgccactatcggctgtacagtgtggagcattggacgtgggtacaccatccgcagatacttcaacaaaattaatgagaaaggagaacagagtgagtaaacatatgctgtcactggaacaggccaatctggctttcgatatccttgcactgatggagaaacacttcccagagaaccccgagctggctgtaacctcgctcaaggtggttcttgaatccacagaagaagccttggaggaatccgaatgagcgtagtcaatgccaaagatttgatcgatccaactgagcttcacagcttcctccagaagctgcttgatgagcacggcgacacaccagagcaactgatggtgttgctgctgaagctggcaactgccaaggctatccttgaagacgccttggaactggaccaaccgattaacgctgtattggagaaagaagaatgaatgtgagagttctaactaggcaagagattctggaccttaaagagggcactgaggctgtatatatcggaaattcacgtctgtactatggacacaccttgatcaggactttagacttccaagacgacacttacagcagctactttgagtaccgagattctgatggcgataagaatgatggttactttggtgaaggtgaggttggcatcagagagaaagaactttcgcctctgttgtttgatagctcgcacatggttagcaagtctgctgagcaggtgttccagcctgatttggacaaacgcaagaacggcaaaatcttggttcacctgtttgaccaaggcttccctaatgccatcttcgaaatctccaaggttatgacttgggcgggtgacgtgaagggctacaagcctcatgactggaagaacctgccagacgcagagaacgccttggaaggtgcggcatcacgtcacaggatggaacacaacaaagagcgtcaaggtggtgcgaaattgattgacattgtggaccatgagagtaaactactccacaaggcccacgaagctttcaacgtgttggctgagcttgagatgattcttacacaaagaattcagtaaaggcttgacacggcctttggaaaaggactataataacgtcctacacaggcaataaccacctaagggaaacccgttaaaaggtttccctttgttttataaggagagttcatgaccattacagctaaaatcatcgctcactccatcgcacctaatggtcaaatgattgttacgtgggagctggagtatcaacgcttcattcacggggagttcatgacacatcgtctgttctcacgtaatgcggcatcaagtcgggctattcccgtagacacaatcatcaaacaagtggccgacaatccggcaatgccaattcactggggagctaaccaatctggaatgcaagcctccaatgaactttcacctgtacttcagataggagccaagtgggcatggaaggccgcagcaaaagctgctgtcaagtgggcacaggtaatggtaaagcttggtctgcacaagcaagcaacaaaccgtatccttgagccgttccagacaatgaagactgtcatgacagctacttgcatggacaacttcttttggctgcgtaaccatgctgacgctcaaccagagattcgtgagttggcacgtttgatgtgggaagctttgcaggcgagcacgcctaatgagttgaagccgggtgattggcacgttccatattacaactctggtgtttggaaggccagcagcacagttcgctccactgagggtgcattccctgttgatgcgttcggacatagccttgagaacgctctggcaatctcttctagctgctgtgctcaagtgagctaccgtaagctggatgacacgctggagaaggctcagatggtgtataagcgccttgtagagagtgagccggtacatgccagcccattcgaacatcaggctacaccgatggtgtgggtttacggttaccagtggacagagctagtgctgaaaggtattgagcctcagtatgagaagggtacaacacaccttgacgataagggtaacttctggtccggcaacttccgaggctggacacaacatcgtcagcttatcccaaataacgtatgtatgaattacactccgaaggagactaaataatgactaacgaacaactgcttgaatttgtcggcagctgggctgctaagaacccagactttgtaaacaacttcgtattgatgcttcaagagtaccgggctgtagctgaggctgctggtctggatgttgagaaagacctgcccaataccaaagcttgccttgagcaactgggcgagctatttgattccatggaggtgttcagtggctgattacgcactgtcattctatgacctgaacatggttgatggctttgcggaagctgtcgccattgacaacaagaaaatctttgagtccattctgtttacgaatggtatggatgtaaagctggggtacgagcttgtagcgtgcaatcatcgcacgatcaataagatcgaatactacggcatccgtgtagaagggtttgaacgtctggacgctgcttggctggctacaggctgtgcaagtcttgaggctcagattgaagcaacagatgataagagcctgagaaaaactcttcgtgtgatgagttatcagggaacactaacaccgaccgataaggatcaataatgtttgatgccattaactcgattgttgatggtcttgtaaagaaggaggctgaaaatgcctcctttgactgggaccgtaagacacagattcaaaccccgacaatgagctacacccgccactacccagagattgtggctctagccaatgaacagctggaaaagaacctctggtttagctctgagatggttgttgagcgtgacaagatgcagatgctttatgagctgacgcctgcccaactccatgcggttaagactgttctacagcttttcctgcgttacgagttgatcgttggtgaagagttctggaatggccttgtcattcgagagttcccacgcccggaagtgaagcttgctgcaagtgtgcttggtatggtggagttggcggttcacgctgagttctataaccagatcaacattgtactgggccttgacaaagaccacgattatgtggctttcgctgatgacccaatcttggcagcacgggttgaatggctggaaagtattttgtctggtgaagacaaagtgttggcaactatcatcttctcgatgactgaaaccgcactgctgtttagttcgttcgccatcctcaagagtttccagtgtaacggacacaacgagattcctgtagttgctcgtggtgctaaccagtcggcagttgacgaagacttgcacggcgttatcagtgcagacattatcaacaagcgttacagagagctgggacgtccactaagagaagacactaagcgtgtcgtaaagatttatgaggctgtcaactatgcttacgagcatgaatgccgaatcattgacatggcgttcattgaagacaaactcaatggtatgacaaaggaagacttcaaagccttcgttcgttatcgcctgaacatcttccttgctcgtattggtcttgatccagcattcgacaacgaagaaaccccaatcaaagattggtttgaaactaacacttatgcctacaagatgattgacttcttctctagcggcatgggtatggaatatgagatgggctggaaggaagaagacttctcagcggcatgggaagacgaagaaggagatgaagagtgacagattattccgcacaacgtaaacaggctcaactagacgggacatgccctgagtggtacacaactggcggataccaactgttcatgaagcgttacagtcaccaaggagaaacggttagaagccgtttccagactgtggctaagacaatggcagatcacgcaccagaggtttaccctgagtggtggaacaacgttccctactgggctggcaagacttgggaagaggctttcttccaagtgctgtgggacggctttgtaagtccgtcaacgccaatgctggctaacgctggtctacgtcaacagggtacgactgtgagctgtgctggtggcctgctggacaacaacctgtacgaccgctaccacatgatgactgagattgctattctcaccaaacactctcatggtacgtcgtttagcttgaacaactggcctgctgaaggtgacaagattcgaggcggacgctccaagggtgttatgccgatcatccgggacacgatcaatgtcatggaagaagttgcccaagggccacgctctggtagctgtgcatacagtatcagcccgttccatggtgacttttatgctgtagcctcgcacctgtacgaacgtactgagtctaacaacttgggttggttgctgtgtgacaaatggtgtgcagcgatgaaggccaaagagcctacagtgttgaaacgctggcgtcgtatgatgtggatcaagatggtcagaggtaagggctactttacgttcattgacaagatgaaccgtcacctagccaaagcgttcaaacgtaaaggaatgaaagttgaggcttccaacctttgccaagaaacttgcttgccaagtaatgacctttacacattcagttgtgtaatcctcaattacaacttggaggtgtaccgtagttggccgccacacttggtcttcattggtcaggttatgagcgattgcaatatctccgaatacttggagacgatggacgagctgtctgcacaagatcgtcgtgctatggcgaagatttatcgcttcaccaaagagttccgtgcccttgggtctggtgttcttggatggcacacattgatgcagcgggaacgcttcagtgttagttccatggaatgtatgatgttgaacacaaccatcttccgaggactggacaaggacagcaaggctgcaactgagtggctggctaaggtcttgggcgagcctgaaggctgtgtgggactcggtatccgcaatgctacacgtctgatgatgcctcctacaaagagcaccgcagaactgatggcaggagcttcagagggtatcggccttgatacggcgatggctttcaccaagcaatccgctggtggtgagttcttccgtatcaacaaggtgttgttggagctgatcaaagagaagggcttggactgggaggaatgtgctaaggaaatcaacgccactaagggtagcgttcaacacgtactctggttgacggatgatgagaaagctgtattccgcacagcctttgagattccaatggaagattacctgcgtctgtgctctcagagacagcgctacatcgaccaagcacaatcgatcaacctctacttcaccagcaacgacagtgagaagtacatcagcaagattcacagactggcgatggaggacgaagggattctgtctctgtactacgtctactccatgcgaggcgggaacatcacccgtgttgaatactgcgaaatgtgtcaataagaggttgacaggcacctgaagcctgtgtagaatccctcccatcagaaacggtggcgagggatttttcatgcaacacacatacaccagccaagtgaaagcaaagctcgaagacgcgggaatctcctttcagaaggttgacaatctacgctgggtgagttatcttgacggctctgaggttgtccacgcaaggacactaggccaatgtgtcaacgacacagcacaggaggttggagaatgacgccacgtgaagaagctatctctgacatgaagtatgccaagagcttgggcatgacagccctcaatcagcactacctgatttggcgaggggcaacagtgctgcacccttcagctgacgctgagtatgctcaggctgtcatggaggtctacgacaaattagacaccgatgagtgtctgctcaaggaggtttgatgcgttacgtttccaagcagtttctctcgccgtgccctcatgaaacgggtagcatggtttgtctgatcgaaaccccgctcgtcaaggacatgtacaactggggtgacggcaccattcgcccgaacctctctgccagtgtgtcattccgtgcttgccacggagagcctgttaatctggatttcgacgcccatgatcaaaagggctttgagaagcgtatggctaaggtcagcttgatgattcaggagctggaagatatgcgtagacaaatgggtgagatgtggtatagtcacttgcgtgattgcgagttcaagacaaaacaattgatggaggatgattgatgtactgtccaatctgtgactgttggaacgaagaatttgaagagtattgcggagagtgtgattctctgctagactctgatctgtttgatgtagaccacgatgatggtctgtcctacggcgaagaggactactaatggcttgggccttcttcagcctcactgtgttgctagtgctcttgggcttcttagctgcacacctcaatatgaaggacactgccgtgtcctgtacaataggtgcgttcgtggcagggtttgccacttgtgcattgtccttaaactaggaggtaatatggtaactatttacggtaaatcagcttgcagcgcttgcgagcaatccaaagctgtgctaaagtctcgcggcattgactttgagtacaaacagctggacaaggactacatcatggaagacttgatggacaagcttgatgagcttggcatgttgggtttccgcaccttcccgttgattgtacaggacggcaagggctacacattcgcaacaatcaaagacgtcaaataaggaggacaaatgatcgacaccgtaaatatccgtcacgtggcaagcattcatcaggcgattgatagcctgcaagcaatcgtctacaaaggcaacgtagaagctggctggtgggaagacctcaagaccggccaagctcaccctaaaggtgacgttacgctgatcttgtccaagctggcactggtccactctgaagtgtctgaagctcttgaaggtgctcgtaaagacctgatggacgacaaactgccagagcgtaagatgctggaagttgaactggcagatgctgttatccgtatccttgacctgtgcggtcatgagggtctggacttggcaggtgcaatcatcgagaagcttgagtacaacgcttcccgtgctgaccacaagaaagagaatcgtctcaaagaaggaggtaagaaggcatgaatactattctttacgttgcaaagttgattcaagatggcaaccttgaacttgaaggtgcaaccacagtcgaaaccgaacggacggctgtttactccaagaatggccgtgaatatatcgatgaatactacatcgacagcgaacgtctcggtccacacaggtatgaggttgagctagaagaactcacctacactgtcgaggaaatccaagactacatcgacgggcctttcgctgctgagctggcagagtacgaggaagagcgtcgtgaggctacagcccgtatagctgagttggtcgaacaagtgaccccgcttatgaatgaactgctgggtctggcaaaccactacaacattccagcgaacatcaaggtgggtgcatacaccaatgacttccgtctgattgatgccgttgactggaattccagttcgatgtattgctaacaactaatccataacaaaggagaaacaatatgactcacactactactatcgttgaacaggttgaactggctgctggtatctctctggttaagaaccgctatgtgggtacgtatcataacggtacaccgtacagctacgaaggccacacccttgaaggtctgtccgacaatgcactggacaacctttcgaagctggctctggttctccagaacctgcctgagggcggcgctctgatcttagatgaagacgaactggaagatttcatcaaagactgggctgctgaaactgctgaggatgctgaactgccgttcaccttcactgaccgtgacggacgcagccaaacgtataccccggcaagcctgtgggaagcttctggttcgtgctctgagtgggaagagtcggctcaagaaggttcggactacggatggaacatttaatgggcgctcgtaacccctacaagggcacagaaacacagtttgaaggtgttaagcgcatcaatgagctgctggatgaggcccagagccttgtctatgaagctgaggctatcgctgatgagttgggtctgtcgttcactgtcaactttggcacgtatggcatgggtggttcctacacaggtgctgccgctgttgaggactggcaacggtctgataacgacgatgcggaagatgttggcctctggaacgcctcttcgcaaagctgctaaataaattacgctctggggttgacagcctcggagcgttttcgtatcatgagcggacacaaacaaaggagatttacaaatgtcgaaattcaaagctggtgaccgtgtacgcttgatcaacccaaatcctgaattcggccttgggtacgctagtgtgggtgatgtgggtgttgtaaaacgggtattcgacccagacagcgttcctgagtacaaagtaaacttcccagatcaggattcatggtctgcaatggaagtggaccttgagcttgtggagtccatcaaaactccacaggtgacaatccctgcggcgattacctttgacgaggcggtgaaagagtgcaacactatccgtcaggaaatcaccaaactgcaaaacaagctgaagtcttacgaagcagttatcactaacgctggtcttaaattcatctgaggatatatcatgcttctgattggtagtcgtgctctggtcgcaaacaaccctgaactggaaggcattcgaaagtgtgtcgattgggattttatctgcaccttggatcagttcaaggcgtggcacaaggcgaacaagggcaaccttcagttcgctgtcccaacccaaggtgggaagtattaccatgcacgtgacaaagacggtatgaactatgagtttgagctggcttggccgggtacgtctgctgaaactctactgattcagtatgggttgaaagatttcaaagtggttcctgaaatcggcccagccgttgcaatcaatgatgacctgttgctgattaagctgagccatcgctataagcgtaactccccacacttcctcaagactatgagtgatatcaaattcttgcgtgagaagcttggggagaaagacgcaaactactggatcaatgtgaatatcggcaatagagcattgctgaaagcccgtgaggctgagtcctacgactacgcacacccaaagctgaatgtcacctccaaggacttcttcactggagatggtgtgcagtatgtgtatgagcatgacagtattcatgaggctgtggcgttgagtgctaaggggtttactccgggtcttggatttgatgagtctccgttcccagcctacaaatactacatgaaggacggctctgaggtgatgacctccaaagagaagttcatgtctgtaccggaacatgtccgcctgtacggcgtctatgaagagtcctgtgtgctcgctctggagcgttcccagattccccatggcttgggtaaggaaggcgggccaacgcctcgctggagctttgagatggctctgatgaaggtgtgtacaagcatcacctctggctggtttcgggaatatgcatgggaaaattacgataaagtgcttgacttgtacaaccagctgggagaagatgactacatcaaccgcttccaaaggaacggccatctactgaaaccatacgtgggagagacaatgtgagtgtggtaaacagggttaagtatcacctcggcatgagggttgtcatgaagtgtgtgggtgggtatgttgtgacccgcaggaatctgctgggcatgcgctactgccttggcacgaatgatggcttctggtggtatgaccgctcctactggagcaaatactgcgtcttcccaaccagagaagccgctgaagctgtgatcaaatgtttcactttctgaaggagtgtgtatgagtaatgcaatgatctgtgccatcatctggggtatgttctccgctgtggcaattgcaccagcgtttgacttgtcaatcgttcaatcgtgtattgtcagtatcatcggcggtgtggttatcaccttcgcagtaaaagattaaaaacacgcttgacactgaacacctaactggctagaatagccgaacaaaccaacacggagaaatatactatgaccaccaccaaaatcatcaccaaagcccaattcgtagccaactaccacgaagctgagaagcgagcagctacttgcgccaaaggcaaggcgtttaccgtcgaagatcgtctcacactgaatgctcaacgcaagcagttgaatctcgactacgctcaggcaagtgctttgtttgatggtgttgccggtcaaggcaagcattacaaccgctttcaacagtgggacgctcagatcagaagtggtctgattcgtaccgcaccttctgcaactggtgaacacgtaggtactccacgcagcactgtgaaggtcaaccatgagttctttgatggtcgtatcaaatcgcacgctgatattcagccagctttcaaccgtgctgcacgtcagctgatcaaggtgggtatcaccaacccacaagaagcgttcaaatatgtttccaacgcatttgaaatggtcaaggttgaacagaagattgacaccaaggcagaacgcatcctcaatgagctgcgtatgggtgacctgaccaaggaacaagtgctgatgaccctcgaaaaggttaagcaacagttctaaagatcgcttgacactgagggcggaagccctcagaatagcccaacacaaacacaacggagtttcaaatgagcaacatgaccaaagctgaattcgacctgtactgtgccaagcatctgacttggaaagcagagaacgccaagaagcgtggaatcgagttcgatctgtcctttcagtcgatgaagaacctgatgggtgccaagcgctgctattacactggcatcgccttgaccaaatccacagggaatggtgagatgcgtttgtcagatgcaaccatcgaccgtattgacggctccaagggttatgtgaagggcaacgttgtggcctgctgccatgctgccaatcagatgaagaaccagtttgaatcgctgggcgttgttggtctgcgtgctgggcggaacatctttgacaaggccctgaaacgtattgaaggagttaagaaatgagcatttacacagtctttgtaatctggtatctgttgggtgtggtgggctgtgtgattgcctcttatgctgacctgaagaaaggtgaagacttcgacttgggtgatctgttaggatgcactgtcctgtcattcgctgggttgatcgtgcttggcttcggagtagcccactgtgtaaaagagctggagcttcagtggcctgtcctgattaagggcaaaggaagcaagtaatgacaactgaccagaaaatgcggtatctggacgatatcaggaagcttgtggtgaaggccacaacctacgaggaagcactgtcacacgccaccttcatgcgtggtatgttggcagcgtggcacgccgatatgagcatcagcagtgagcaataccgcacaacccatggtgaccttgaagtcatcttggaagtgaagcggaaactaccaagcaagaatgaaggagtagggttttgaagagaatgaacgctgaagagtttggcaagagctgggagtacgaccgggctaagcgtgaggaacgcaagaacactcgtaaatcccgtgagcgtcgtcgctctggccgtggcgtgtgggaagctaaaccagcagacgaataatcgtttgctttcccagagaatctgctgtaaagtgtgtgacacaaccaaccactaggagatacacaatgcaagttaagatgaagcctctgtacatgatcgctggcggcactgatggttacgtttcgatccactacacctttgatggtgagcttgcacagcgtgtgatcgacgagaaccctaactcctttggtgggatggactctggtcctgactgcatcatggtgcctgagcagatgacttacgctgatctgggtatcacttggacagttgaggacaacgaagaatgagtaagcttgagatggctgatgttgtaagggcacacatggatattcccggttgccctatcctgactagcaaccagtgtcacgcactcgctgtgaagctgaatgctgtgcttgaggatgagcctacttttccaactgcttgggcgcttgttaactctcagggtgaggtagtggatgtgactctgatgtggggagttgccaagcattggcccggacaagtcactgggctttacgcaccagtaggtaaacggaaatgatcaactaccaacagaaagacgattacatcgtcgtgaaatggaagaagactcagataggccgcatctaccacgaggaaagcggctgggtgtataagcccagaggatgcgagggaaagattgtaagtgaagcctttcctaagctatcccagctgaagcaacacttggaaggagacggctcatgagtggctatgacgatgggttttatgtaacagtcatggtgttgggtatgtttgctctggcaggctttaccatgtacctgatatcaaaagaataacccgcttcggcgggtttatttatgcccattacttttagggcggcttactttaccagcttacttttatggcggcagggtattcgccaaaaggttttgcatagcgaatttccccggatagattttcacagagagctgtacaaagccagtcatacactgtatgatacacacatcaaccaacaaggagaacaccatgtcctacaagcttaaatgccgctcttgtggcagagaattcacagcaaactccaaacatgcgaagtgttcagcatactggtgtgagtcttccagtacatcagtcttagaagaccttgctgatgtggctgttagtgttgctgtgggctatgccgtgggtgatatcgctggtgatgtgatcagtggtgtgggtagcatgatcggcagcatcttcgactgataaatttagaaacggatagattttcagggaattagaaacggctggaaatttacagaaatttagaaacgggtcgatttttacagagcgattcagcctcacgtggatagagaattcgggagagtgacgtgccacaccagattcttgtagcacgccaactccccagcgattgagagtgataatcattctcatctagagttgagatgaattctcatttacatctgctgttgataatcattcgcattaccagaatgacgggcaccctccccaccttgtactccagtgtctggcctcccggctgtcgttcctgctgtgtacgattatacagacccagacaggcaatgcaaccacttgcagtaaatatttttctgtgatattcgcgtgcgctcgggcgctggatggatagaaagcagtgaaaataatttgaaaatagtggttgacgtgctctcaggttttgataagatggcggcacaccaaacgaaacagccgctaaggctaaaggaagtagcagtatgaagacgccaaagttcgcagtaggtcaagttgtcaaggtagtagcttgtggttggggttgtggtcctgattatgttggcatgactgctacagtgaagcaagctatcaacggctcgacgtatccggtatatcaggttgtgtttgaaaacggaactctgtcggatatcagtatctgggaaccagcctttgaagctgttgaggatgaccgcacgccagcccagcaaatgggtatcactgtcggtacgctggttcgcttgactgttaaccgtggcggacgttgggcaatagggactactgcacgtctgttttctgacgacgagtccacctgcccactgttcgagcacactgctacgctcgacacacgtttccttaaccttgatgaagtcgaggttgtgcctgaagtgccagccgtaacgcctctggcaccgcctgtgccgcatggctacacagcattgcagaacatggcagtaaacacctttcaaatgatgtatgatgcggcagtggcttaccgcaatggtgactctactcgcctcaaccatcaatacgggatatgcgataacatcgaacgcttcgcaaatgcggtaagtgctaacgtacgtcaaatgtctgaagtcaaggaaaacttgattcgcaccactgccagttacagcggcgactactcgtaccctgttaaaggtgttgagggtttgaatccttcggatgcgttctgccgttatagtgacaagtggggcggcgagtatggtgccaatcgtttgcagcagttgggcgaggtgatcgaactcattaagaccaattggtccgatgatctggtaaaccgtctgacgccagctaaacgcaatggcttgcaggtcggcgatatggtgcgctatactggcagtggtcgtcacaatagcagtatctgggttctgcgttacgatgatcagtcgtcgtcgcctagcttccatcgcttgggcgagcctgacaactacaatgaccttgatttgagccatgttgtcaaggttgacagcagcctgacaggcgagcacactgtaggtgagttcctgtctaccatcgctgaaaaggtggaagctaagagcgccttggaaaagcagattgaagacctgcaaaagcagttggcaagcttgacgggtgatatcgctttgttggacgctggccttgcacagcagcacaaagtaaaacgcatttaacccttgcatgtgtggcttgttcctgtagaataggccacacagataaactgaagtgagtagtagtttatggattacatgctagacccgcctgacgattactatgatgattgtgaggacgagcaggacgatgacttcgatcctgattatgacgatgggcttgacgatgaggcagccgccaacgcctcaagccactggcaaaattcacggggtttctaatggaactaaagatcggcgatgacgtggtgaccgagcacggtgcaggctttgttgtaggttgggaagccttcgacggcaaaggcttttctttgccagtttctaaggttgacactggccgacgtgtggtgataaagttgcttgtaggtcacacgtggccgttcgaagggctgtattatacccaagcccacgagttgaaaattcctagttgacaacctgctaaccgttgtctacaatacaaccacacaaaccagaggtatgcaccatggctactatcacaatcaaaggcgcttccatccaacgtaagcgggaaattctggatgccaacaaaggtcaagtctttggcgtgacatggcagaagaaagacggcaccactacgagccgcgtcgttaagcagtggatgaacaaagccctgtcaagcggcaccagtgaaatcgtgcaggccaacccagcggcacacaacccagacaactacacagccgctgaccctgagaagatggcgaagggcaacccgtatccttgggttaatatcaccctgtcgaagatgacaagggctaaggtggacggcaccgaatatctgttcgaggactagcctaaaggctggccgctagtgagtttgtaatgcacactgtagcttaaataaagagcagcggttaaaacaggtaatgctggccgtcagtgtaggtgcaacccctaccagtgtgcattgcaggcaatcaagcctacaactgaagtgagtagtagttatgcgagtagtgagagccgtagagttcgcaaaggattatcagtatcaacaggctaagaaacaacaacgccgtagcgagattggccgtcgttctggccgtcgcggcactggtgcatggggcatttggaatgaggccgaataaatgaaaaagccatatgagcaaggttatgaagcgtacaagcatggcgtgtggcgtagtgaaaacccgtacagtgatgggacgccagagcatgacgagtgggagcggggtttcctacaggccgaacaagacgagtaaaagaaaacactaagccccttgacaggggctttttcgttgtctacactgtacgctagaaggtagaagtacctaaggttgttgtctaggagattgcactatgttgttctatgtttggtttgattcagttcaaaacgctgttatgtgggcaatcgccaccaatacccaaccccgcaagcttggcaagcttaacggtcattggtatgtggggttctaatatggctggtatcagaagggcaccaaaaccagaagcgaaaccaaaagtaaaacctgttgttccgttgcatcgtcgcatcttaggccgtggtgcggtcgagattgacactatcgatgatctgaggattgagcttgaaaaggcttatgaactagaccagatggagtacgacacttatctagactgccatgaagctttagacctgcgtgaggctaaggcaaaggtagcactagacaaggccacggggcgttatatcaagccttcgaagtcgattgacgttccggtcaaggtcgtacaacgcaagcccctaaagccgtggcagattaagtgcatcatggtgattgtcgttctgcttttcttcaaaatttcttcattgaaggcttgacgggctgtttcaatgctgtagaatcacccacatcgaaaggcaataacgcctttgcagtcgaaccgaggttagcaatgttctacgttcttaaagcagtatccggcaaccgcaaaactggtcctatgcctgtcagcactagcaatagctctacttgccccgatgcatgccctatcaagctcaaaggctgttacgctaagtatggcccaactggcatggcatggcgtaaggttgacagcggtcaagcaaaggacgctgtagagtggccggagtttatcaagaacgtaaagcgtctgccgtctaacaccttgtggcgtcacaatcaagccggtgatttgaacggctatggtgattttattgataccaatatgttagatcaacttgtggtagcgaataagggcaaacgtggctttacatacacgcattacgacacacttgataaaccttctaacgctttggctgtagctttggctaatgatgcaggctttacaatcaacctgtcgggcaacaccactgcacacgcagaccagcttaaagctttgaacattggtcctgttgtagtcatgatgccacgtgacgcagacaaagtaagttatacgccagcaggtaacaaagttgtaatctgccctgctgaaaacagtgaccgcgtaaactgccaaacttgcgctttgtgccagaaagttgaccgagattatattatcggtttccgtgcccatggcacagccgcaaaaactgtcgagattatcgccagaggctaaccaacaaagagcgccaacctaaccgctggcgctgtattcttgaaggttgtagttatgaactccactatctatagcgcgctcaatcagtgcagcacgacaggactagaacgcctcattggtgatatgagtttcccggacggcaagcgggtcgagctttacagggaccacaaaggatggcaccgcatcgccttgtttgagagtgacgcgccagacagcggaatcagtggtgttatcgtccaagccgatggcgagatatactacaagcaaactgcgccccacgcccaaggcaatgggcacacaagaagtttgcaagccctgttgacaatctggggcatacactggtatcgttctgagttgttaactgaagcaggcgctgcctgttatcagagtaaaagaatttcaaatagtgctttacaaggtagttcattcctgtagaatgatcaccatagagaggcaagacagcctctcaccactaaaaggaagtcgcaccatggcacaagtaatcaccactaaattcgttgcaccgactaacactcgtggcgctcgcatcaaggttacaggctggatcaattctgcaacctatccttgggaccataatttgtccgtagaagaaaaccacgctgttgctgttgggcactacgtgtacgaattgaacaaagagcgtcaaggtgattttcaatgggcgatcactggcggtggcagtatgccagatggtaagggttatggtttcgtgatcgaccttgcctaattgttccacgtgaaacactctaggccagccaatgagctggccttttgctttgtgtaaaggcaatgtaaataatcgattcagctattgaccataaacgttacagtctatagaatggtcaccactggttaggcaatcgcctagccacattaggagcgtaagtagaagatgggcgtacagaatcaagctgtttctgagttgtgcaaagttaaggctttccatggctgtgcagttttcagcggagttgttcacgtcagtgatgacgatatgatgaaacaccttgatagccaatatgatgaggttatcatttgcaacatagctatcaaagccggtaaagccctgtacagtagtgcgcctctggtattctccaacctgaaggtggagtacacaaagtatttgcaggatgagttgcattctcagttgagggacgacaacgacgtcgatattgactggcacgaataagctaacccattgattgataaggccgcctagagcggccttttctttttctgaaaatatttgcattccctccttgacgcctgcttaggttggactatcctttgaataacaggaaaacaaaccgcctgttgaacgttccacgtggaacaatcaccactctaggagaaacgccatgttccgtgacaatgaaggtctgccaaccccaatcgcttcgattgataccctgttgaaagaagctgacagcagcgcccgccctgaaaaggtgttcatcggtcacaacttgggccatcgcactttcatggccctgattccaatgaaagacttctacgccatgtcaaaggtggcgaacgagcgccagccagacggcacgccagccactcaacgcccactcaacgaggcacacgctacagcccttgcaaagtacatcctgcgtggcctgctggccgctgcaattgaataccgccagaacttcggcaagcctgagtctgacgccttgaacgagctacagcgtgttatgggtccgcaagcttacatgtcgttgcaacccatcgtcgccaacattcgcacatgtgatccgggcggacgtggcattgaaggtaagcgcatggaaagcgaaggcgagacggcctgctttaaagtgtaccttggacaacgcgatctgctctacgtgatcgacggccagcatcgccggtatgccatggatttggttttcgagttccttaatgaaattcgtctcaatcgcaaatacccacgcaagcccaaactgtttgaaggcaacttcaaagatgtgattcctaatgatgtgttggccgcttgggatgagtgcgacgaagtggcaaggggcttttgcaagattgctgtcgaaatccatcttgggttgggcgttaaagaggaacaacaactgttccatgatcttaacaaccttgccaagaaggttgaaaggagtttggccctcaagtttgacagtgccaacccggttaaccagtttatccagaatgacctgttgcctaacattctggattgggacgatgtgatcgatggtgaccagtccaattggaacaaggatacaggacgttggactttccgcgatctggccgctgtcaatgcaatcctgttccttaacaagaccagcattgccagtgcaacgcccaaggatgtggaagacaaacaagctacagcctatcgcatgtggcacgctatagcgaacgttcctggcttcggcaagccgggggcaaaggctaccactgttatggctcagcctgtcgtcgtgaaggccattgcaaagcttgtgtacgacctagggtttggccgtcgtcgtgatgagtctgctgccgaagaccttgaaaagcttttgcttaacttgtctcaagtgaacttcagccacactaaccctgtatggcggttctatgagatgaccgagcaagaacgcatcaaagccaagctcaacggcctgcgtgcctacttgccagagaatggctctggtaaccgtgatatcggttcattcgacgcacagaacaagtggatgaagtttggcacacgccataacgatatctaccctgtcatcggcgacatgattcgttggttgcttcaactgccaagccgtaataacatcgtcaaggatgagcaagcggcgtaacactacagcccctcctagtgaggggctttctttcatcctaggaggttagagcaatgggcctgttagaaaagctaatgacaatctttctcatttgcgtgctgagcctgctggtgctagagttcggcgttatcctgttcctgttgtattttcttgaaggttgctattaaaaggtgttgaaaaggtgttgacatgggttttcaaggctgtagaatgagcgacacacaaggcaaaacgccttaaccgattggagtagcacagaatgttgcacttgaccgataaagaagttagcgagcttttcgagaaagctttcaattctgagtgcggttccgccagtgacggttgcggctcccgttatacggctgaagagctgtattatgaggaacaacaaaggtatgcaactaaatggttttggtcccatcggaaccaacgcctaacaccagagcaaatcgaaaacccaccgtctaaccggacttgggaagatttcgtgaactaagacaagccccttaattggggctttgccaatagtagaagttccttttagtcgtaggagtaattgcaatggccgtaacagttaccagcttgacccatcccaccatgattgccaagattcgtaagggcctgtactacgcccacaaaggccaaggtcacatgatgcaaggtcatggcaatcgggtttacatccagaacgccagaggccagaacatcatgcggctcaactggattggtggacgtcaaggctatattgtctatggtcaagaatcacgagacgtcacggacactgttaaagcagccctcaagattgctaaggtccgagactatgccatcgcatataacggcgtccctgtacgctctggcacactccctaggacggttgcggtatctggtctggcattgctgttaacaggttgtcagtcccatggtgcagtatctgccatggtgcaagtgttgagtgggttgcttacatgaacattcaaatcattctccaccgggcaataaagcgtgttgaggtggcacggcataacaaggtgtttacatctggtcatgtctacaacatggcacactttcgggccattgaacgcaagttcaaagcatgggacgcactaggctggccgtacatagtgaaggaataaaagcgtttcggcgagacgttaccgccattgtgactgaatcctttggcggttgtcaacaccataaattttcaattttcttgaaaatagtgcttgcgtgggtgattggttgatgtagaatgacagccatagggaagcagacagcgacccactcaatcgaaggtgacagcatgaacgttatgaagaaagcccacaaactgacccgtgaagctttggccgctgctggttgcaaaggcttgaactaccgttcactgtttatcgctgccctcaaagattgccataggatcaacaaggctatgcaaagcgctccaaagaccactgcacagatttatcaagaaggcaagaaggcttaccttgattcggtagaggtggacgccaacccttaccattttggcattatggctaccgtgtgggaagatggctattacacagccatgcaagacaacgcgatcaaagagattcttagtcgctaataacacttgcaatgggcattcttagtgtatagaatgccctcaagcccacacaatacaaggtagcaagccatgacacctaaagagaaaatgctcgtgaaactcgccatccttgtttctgctgttatcatcatctgcgttctttggagcctttcataatgtcctttatcgcccttgctctgacactctgcaccgctgtaggcgctgacgatctggcctgcaacacctatatggttgatgcctttgcaggcgatatccctgtaggccaaatgatgccactcaagaaagttagcctgtcagaccagtggacggactgcctgacccgccttgaagaagaaacccacttggcaaggagtgccgccatggctgaccgagccacccgcccatcggccaatgacggccagagcacagcccatcgtcaagcctacctacagcgcttcaatatcgctgaagacgtcaaatcggttgacgtgtgggagtacaggtgcgaacgcttgaaagaaagcgaaatcccgtaaggaggatgttcccatgttcctatccaaacacgcccaaaagactctcaagctcctgttagatgaaagggcaaggcttagccaatcaaacgtcaacagtgaggctgtagagcgcttgacaggctttatcgtctccatacgcaacagtgccgtatatgaggccatgccagagcctagccacattgatgcggacggcatcgacaccagcaagacagttctgcttaagcgtggtgagtcgatcaccctgacagccttctaatgttccacgtggaacaaaatagcccgccttgagcgggcttagccatgcctaaaataattgaaaatagtggttgacggcctcaacgcttcctatagaatagcgtcatacccaaccagaacggagtgatgcaacatgaccaacaccaacaacaccaacactgtgaaagcccttctggtagccttcacaggaaagcgtctggtaaccactgacgaagccacctacaacacaatctctgggcgtgctcctgctatctctcaggacgtgatgcacactgatgtaggccctgccatcgttacccgtgcttatggtagtggtgaagagtgctacaaagttgattttgaaggccagcccaacaaattcttcaaattgtaaataaggcttgcagcggtcgaaaggccgctgtagaatctctacatcgaaagcgaactgccaaagggctaaccaaatgaaaaccacaaagactccaaaagctccaaagcgcacaatccgccagaacgcttatggcacttgggttggctacgttggccgtgctcgcatggaagacttcggcgatgatacccacgcagaacgtctcgcccaatactggcttgagactggcgtcattgaccaccacgcctgctacaactaatccaatcgcccggtgagagccgggccactcccagaggtgatgcaaatgagaaagattcaaaccttcagcaatgaaaaccttgagctgaatcgcattgctcgaatcttccaaaccgagccacaaaagggcttggaagcaatccacgtgccaacctatgaagtgtctacgcacgcaggcggtgttgctgttgaatgggagtttcaaagcttccagcatcttgaggatgcccaacaatacgcgctccaattcattatgcctcgtggcatgatctgcaaaataatatccacctaaagcctaaataggtgttgcgtggagtgttctacattgatagaatgctcccacacccacttaaacaggtatagcaaaatggataagcaaaagctcgaaggactcaaagcccgcctcatgtctcgccttgctgacgctgaagcccgtattgttcgccacactggcgtgcgtggctacggtaacgaaacttgcctcgcaatggctgaagatcgcgctattgcactgaaacagaagatttacgaaatcaacctcctgttggcctaagcgacagcttagagaatcaagcctccttagccggaggctttttcgtttgcacctgagaatcattctcgcaccatagcgacagctatgagagcaaacctttcaaagcaaagcgttagctttgttgttgataatggataataaaaatatagtaaaaacccctctaaaacctcgtataaacctgcctacggcagtaggcgtcataaccctaagtcctacggactaacgtcgctcaaatcggcctgtaggccacgtgggacaagccctagagagagtttaaccactcatagcctgagctatgaataataccctttttcctgtctaaacccctttccgtgacgctcgggcagggaagatcgccgtctaggcgagctgtactaagcgaagcgttcacaatcttaccattttgtcaaatactttcttagaataagaccctatgtcctacggacaaaacattctaacacctgaccagtcaaatcccctagattggcacaatcctagcaaggcaaatcgcatgccaagattttccacttgagagaggttcccatttgagaagtgttcctattagggccttgccctgagtggtagtccacctgagagtggttctctatatataatgcgacggaatcacatttaggataattcgcaccacaagcaagaccctcacccatagggcctacccctatacaacactaccctcagagagtgttccacatggaacattgttcctctatatataatgcgacggaatcaactcagtgtgtaaacaccttgtcagagtagcccttgtcagtggtagaacaggtcagtgcgagagcacctaaatgatatccattctcaagcataaccccttgtcagtagtgtcctctgagctagcaagacctatgccagtgtctctatatataatgcgacggaatcactttggggagtgttccacgtgaaacaatcactcgggcagggtatgcttgagagagaaacccctttgagagtgtggtcgttttcatggatacgaatgagaattattttcattttactagcggctggcctttgcggcctagctctgtgttaagcacctctcgcacaaatctggctttgggaaaggacactcccaaggaggacacaccttgtcggtagtctcgccttgtcagttatatttcctataggcaaagaaaagccctcaatgaagagggccttatttttggcggcggggttgggttctacaggctacgctgtcctctgagccttgtcatacagtatctcacacaatcataatcatgagggaatgacagatcgaacatcacttgggaaaactccaatccagcgatctgattaatgtcttggtaatcttctatgagaatccaatacaccttcccatcatcccactgcatcaccttgtgaggcttcatcgcctcagtggctctgataactcctatccgtgcgacatagcggaggacgtcattctccagctcttttatacagccaaacagtctcgcttcacgttccatcagcccaccaccgtgcgaactactggctgaaccttctggaatttgatccacttttcagcttcctcaatggtatcgaaaaagctgcttacgcgatcccagatgaagaacgttctttcctgcacctcgtagtatttgtaatgcccttctttccttgtctctacgattcgatacttgctcatttgttccagttcctttgtctgataatctcatacaccgacatgtagacgacagagagtataagacccacaacaaacaacacggaaaggacacccgccactttagggaagatcgctacaaacaggattatcaggatcagtgccaaaaccatgaccaacattgccttgatggttttgatgtgtagttctttatcactcataaggtgtgctccactttcagttcttcatagacaacccaaccaccttcatgccactcgccttcatggtcgatgacataggcacccgccttgaagtagaatgggtatgcactccaagcttgatcaatagggcaagatgccaccacaccactgaggttggccaccacttcgccattacccacattgatctgatacttacgtgcatcactcaagcggcaaggaatccgtgcaaggttgatcagctcgccatttggcgtaggtcttgcttggatacgcagttcgccgttccaccatgccaacatcaggaatgggttagaggctccgtgtgcatgcacttgaccaatgatcaccttctggctgctaggagccagctcaacacggacagtgcctgctagggtgtggacaccttcaaagggtgaccagttgaggcccttacgtgagaagtcatacacctcacgcaactcagtgcgagggctggagcttgaaccagacgttccgcctaggacagagcaccagaagttgtaatgaagcttagggtcaatccagaacagctctgaaggactctcagagaagtagtcgtaagtggtgccgtgtgctgtaatgttccaatctgtcattttaccaatctcctgaaaatttacccatgggttcgaaatcatcgtagttttgacttttaggtcgttccacttggtcattagtaacacctataaacttgttcaaatgcttcacgcattccttacacagaatgatttgaactcgtttcccgcctaagcttgtagaccaaaatacaagctcttcgtcgttccgcttgatgatacggtcacagagacggcaagagcagtcttgttgtgattgcctcagtttcagctctctcacagtgcgtcctcccatttagttcctgtaatataatgcttcatcagagcctgatagtcaagcaccgcttcagggtgtgccgccttaatctgttcgacataccacacccaaccaccttcagagtcgcccttcttaggagtcactttacccaattgaagcacccctcacggatagctggcaaatcgcctccacagacacaaccaccttcacggttgcaataaccagtggagccagtcaggtgcaagagagccgcttcaacgctgcccatcaggtctactgcttccttggcttctttgagtccacaccctgcacgttgtctcacatccttgatcatctgcactttattagctacgacaggtgtagggacatattggggtgcggaagcccaaagagcttcaacagtgtcttggaactgctcagcaggtgttggaatcatattctccaacagacgtagagcacgctccttgttggcccactgagagcgttcactatcacatgatacaccaaccccagacgggatgtggtgtacgatgaccccgtttgtggagtgtcctacagacattccgcttgcaccatgaccaccttgtggagggtagtttgtgactctcaaatctagtggatcaagcatagaaaacccctgagaatgcgtaagacctgttgccccagttcttgataacctgttcagcttccttgatgtactttgcttcaagcttacgcttggagtcttgcttacccttctgtcgtgctttcatctcatctcccaagctataaaagttagtgtaccaaataggacggcgaacataaggactccgggccaaacactcatatcaatctccccagtaagtgagttcttcatctacagcgtctaccgcactatacatgagttcaccaccttcgtcaaccgagtgatagtgcaagttctctgcaaggtcgagtgcatcatagatttcatcctgagcatacaagccgatagaaatcatgtaacctacagcatcagcaatccactcacggcgttcagctgcttgacgttctgcacgggttaccgctttcacttctacaactgctgtcatggtttcctccctacactgcaaatgtctataagattctcgtcacagagtgtatacagctgctctgctagtccgttggactgagggtactttcgctcgtacagttgcaccattctgtacgccacgtcgttctgccttgaggtgcggcaactcttgataacagacacaaccttccagtagtcactcattctccaaaccctcagtcaagccccacgcttcaagagcatcccaaagcgtgaggtgatattgtttaacgggagacacataagagcgtgcgtgatcccggatggtgtcattcattggtgcttcaaaccatggagatggttcttccgccccgcagatagggcacaccttaccagcagcttcgtgcttcgccagcttcacagaatttgtagctgacgcttgtgctgtagtatccattcgactctccataccagcgaatccaagtgtagccacgatcagtttggatggtgtagaaggtccactcttcgtcaccgtagtctgtctcaccctccttggaggaaacatccagatcgtagaaggcagctcctacaaggtctgcacttgtatcgatatcacagatgctgacagattcacaacagtcctgctcatgccacatgtggagtgcggaaccatcagtaaaggtgatcaccacttcgtcagagcctacgtgaagtccatccactctcgaaatgattttaccataaaatgtttcattcatctttaatctctcctttaatttctatttggcgtactacgccatttttcctcgcgttcacgtgcagccttccggctgcgtcaaactcaatctggacagattctagcaccaaatcgtaagtctccgcaagaagtttcttcagctggtcaaggtgtttatcctcaaccggcttcatgcgatcacatcgtcccacggaacagtgttcatgtcaaaggcttcgtaagcagtcatgatttcgaccgcttcaccaagctcattgtacaccgaatagctcacagtttcacccggaaatgggaactctgggaagaagtctgaccatacacgtgcccgaacaccataaggcaagcctcgtggggtctttccagtcagctcattgaacttcagagcctcagacaggatcattggcacgtctttgacgtagaagttgatgctcttctgcttcatcacgaagtcaagacggtaatcggcgatttgtccgccttcgcggcaccagtggtagttattgaacatttatttcactcctatgtatgaccttcagggctatacttagccacaaattctttgctaacacccttatccgcaaggtgttgtaaatctcggcagacttggcattcacaactcatttcccaacttccccagttctgtaggcttgctgcatccgtcccatttcagggtgcgaccattcaaaccgtggaacaggacataactgctggtggagaacaggctaataccttctttacagatatctctaccgtaccgagttggaacctcgaagccctgaacattccagaagctccaacgctcgccacagcactcgcaatactcccaagcttcagccttgtcgatcaaccccgacataattccttcagcctgctcagcgttcatagcctgtacgtaaaccacatcagcgacaaaatcatcacgcacgaagtagccaccagagttgttctggtcgaattcgtaccacaaagcaccttcaatagcaatttccatgtcaatcctccttcaaatctgtttggggcatgtcctctctcggatagatgaacactgccgggtatcgcattgatcttatcgcatcatcacagaagttgtcaatcaatctttcgtgcaacagctgacaagccttcatatagcgttgagcttgacgttcagcaatgttcagtaggtgcgagattgagcttgcgtttatctcttcaaggcatgcgaagcattggagaatcttgcccttactcaaaggcacactcttggtgccacgtcgataccagtctaatcttgccacaccagacacagcgtcgtcaacccacaaaggccaactatcctcgtccataaagcgtatttgttgaatctctggtaaaatgcagttaacaaaagaggcgggcttgcggcccgcctcagttggtgtgaacacataaagggttttctccctcttagcgatcagcttgtcagcattggcagagatacgagcattcaaagtctcgatttcctccgctgtcatcatacaggcaattgctcaggcaacagctctggcgttgggtacagcccaaatgggtctacagtcggtactgaaggccacagagctttctcttctgcgaggtagtaattctccttgaagcgagcatgaccaccatcagcgtagtacacatggtactgaaccacagacgttttactgccgttgccagcagcgttacgctcagctttgattgccgcaatatccttgctgccatttaccgtgcaatcaacccaccaatcggaaatcataggaccaagcccttgattgcccatttcaaccattcggcagatgatgtaaaccattactcttttgtttgtagccattccttaaacctcatgttaggagagacataacttgcctctacagcatattgtatcatatccatcaagatatgtacacctttattatagtttccagagataagccaacgggcatcttcaatcttgtcgagcatgtacatcttgtcttcctcatcaagaaggttgacaccttgcacaaactgctctcgcactttggtaagatactcgctgtactgttcagcttgactagctgtcattgtcccgtgtgacattacatacctccaatccatttactgattcgttcgaagtgttctggttttgccagattgaacacagaggattcaccaatttgctcaattgccagattgatcgctgtagccgtaccacctttagggtttccagctttatccaaccgtgtccatgctatcagcattttagatggctggtcaagcgtcttacccaacacttggaacacatttcgagtgtgcatctttcttgcaccctgcttacaggcttcccaagctgggtgaatacccatagccatgccctcagcaatccgttcaatgtccagcctgatatcgcttggcaggatgttcagattcccgtgagtgttcttataatggccttcgtagccactccaaggcaggtagatttcagcaggaacccaaccgtaaggctggtcataacccacacagcggaacataccgttttcaaaggcttggtcggctccaacagccccgcctgagcgtagtgtccaaccttgggaagcgagagcaaatcctacacgctccatcagctccagaatgtcactcggcgtctctcttgatccaactcccgtgtaaaacttcaatgtcacctcccttctagtttcctccaagctttgtcaagctctgccagatgtttatccaactcagcgaatttcttcgcttggtaaagctccatggcatgactgcccggagccagataaccctctttgtatttaaccgcgtcccggtacatcagtaaaacctcttaccgcttttatcgatcttgccacagagtaggtaaactccataacatacgaacgcaaaaccaatcactgttagcatttgtcttcctccctcagcacgtagatggtaacatcccaatcgcctttgaacacctcttcgatgatggcgacaatcgtgtcccagtcaccacctccaagtccagcgccgatcttagggaagccgattcgcaagaactcttcttcatgtggagctatcatagccagatcatcccgcatatccagcattgcctcacgaagcttcgcgtactgggtgtagcctttgttgtcgtacccgtaattgtactggccgtacaggttgtagatcaaaccatgagagccatcagaacgcacgtaagaaccaacactagaccagccaagcttcagcttatcacccttctcagtctcacagtctgccgcgtaggcatccggaaaggcgagacgaatggccttggcaacgccagagttcatcgtgttgaagcagttggcttggtgcccgattgaggacacttcgccactcttgagagcttctacaaggtcacccactttatatttgatagtcatacgtacagggtatccttccagtgttgttgttttgctgccatacgcccgcaagtgtagattgctgcgtaagttatgacgatcagtgcgaaaatccagaacatgttcacctccttaggttaagaaaaagcgcccctctcggagcgcccagtcattatgccaaacgttgacgtacttcgtcaagggttgtctgattgacaaacttaccatcttcgaaacgagtgactaagctattcagcggaccatcctcttcctcctgagtaacctgatcttgaaggctgtactctcctgcgttgctaatcactcgaagcaaacccttcgcactcttcttcttgctgtcagtcttcgggtctttgaagatgttgacaggttgaccgtctacaaccgagtaggttgctttgacggcgaatccgaatgtatcacgtgtgttgcactggtaggtgtacgaaccaacaccaaacacaacgttgcacgatgcaaaccctttggccttcagacgctccagaatgtctacacagcgttttgtggtgatgctgtcgccgtagatcagaccaatgtgacgatccaacactttgtaaccagcttcgttggtttcgcctccgaagatttcccacagcacttcgattgcacctttttgttctgctgtcagttcaacctcttcgtcatcatcgtgcatatcaaatgtgatatcgccacagcgttcacggtaagcctcaccaacaacacgtcgaattttctgatcgcggttgcggacaaagaattcaatctcgtctccaccgttatgaccttgtgccagagtataaccaatgtcattcagtgcatcttccaagtattcggtgcattcaatgtgtgtaaggtcatgaaccttaacaccacaaatcacctcaacaggatcaccactatcagggcggattaccagcttagccagaccgttggcatcgtctttacggttcaggatatcctctgccagagttggcagaaccacagtcagaacactccagaagtcataggtgtctgccacgtagctgatgatcccacttgggaacttccgagtgatcaagtccttcatgaacagagtctcagcgtacaaccgagaacctacgatattggccgctggattgcttaccaacttctgttcaatgctcaggatgttgttcgaacttacagcgtgctcagtggctggtacagagattgcaaccagaccttcagcattgtagtagtcctcaacgtagtcaatcgcactcaaggtgtcagtcccaacaaacgaggtcaagtgagcactacccgaacgtgcagcatcctcaggaccagacatgccacggcaagagaagtcgtgagcctgaatagagatgccgaaagcatcgtagcagccagtttccttggcaaagtgagtcagtgcagccttgtactcagcagcgatggttgcgtttgtcgaagtcttccaagtgctgttggagattacagtctccagatagttcaccagccagaagtgttcatcgacagtgttggtgaccgtcagaaccggaatacccattggtactttcgaaccttcgtccagagtcttgatgcgcagtggcaggtagcccagatcatgcagagcggccagacgatcagcactaacgacaccagcacccagataagcatcaacacgtttggtaaaccgtgcgatggctttgtccttacggacgtcgaagaagctcttgttccacatttcaacgatttcatggatggctccttgggcaccgaagaacaccagattgccatcgtagaaacgagtggcggtacggcggtaaatcttgtcagtacgcggagtcaggttgctgtacacctgagtggtgccatcagcatacatgtcagcgtgacccagcttgtaaccatcagagttcagagcggcttgcagttgcatagtgttttccccttaattaacgaagtaagcttcccagatgagcaggaccacccagagtcctacgaaaatctctactaaatattccatcacatctccactactgtgagtttactgtgtgccttctgcggcaatgtgtttgtagtgtatacgtgatcaaacacgtttgtcaacacctcaacacctttcgagaagattccgtgtgtaacagccagctcgattgtgtattcgaggataccgttttcgtttgcaggtgaacactgttcaattgcattagccacctcagtgaaggtacgaccaccatcacagatatcgtccagaacaagcagctggcaaccgtaggtgaggatttctggattcaacacttccatacccagaatcttgccgtctgcaaggttacgcttcttgttgcaatacagcacgtccttggctccaacccgtttggcgaagtcttcggtcttcttgaccgcacccatgtcgggagccaccagaatcacgtcaccaaagcttggcttgatacgggaaaacgcttcaaactgctcaatgacgtagcaacggtccaaagcagccaccagaacagggctgtgagggtctacaaccgtcactgtggcgtagttctgtgcgttgatgagcttagctaccacctgcacgctcaaagcctctccagcgttgcatacgcggtcctgacgagcatacgggaagtatggaatggtcaggtcgatcttggcgttcgggtagacacgacgcagagcatcagttgccaagaacatcgccatcagttggtcgctgttttggatacgagcttcaaggtcaatcacctctacgtcctgtgcccagtagtcaaaggcgttggtgctgccggtgttcacgttcacgccaacttcaccgcccggaaaggtcatggtggagatggatacacggcggccttgtttttcgttcagcgtgtaaaacaggttttcgttaaattcaggcattttgttcactccttatgtgaaagtggggccatcttacaagaagacagccccagtgtcaatcaccaatcgatatcgattgtgtactcaccctcttcaagcaagccacgcttgacaagatcatgggcgacggcttcagctgttgggtagaaattgcgttcccagaacatgcccagaaaagtctcatcaccagctttaccgtcccactctttagggtcacgggcaagccatgctgcgaagcttacgcccatctcatcaccattgatcacgtcaggaacggtttcgtcctcgaagtcatacacgtttttagggtcagacattgcttgaatgcgctcacgacctcgacctttgcacccgtcttgctgttggaagctgtaagtgcgaccataggtattggtaaccagagaatcccagtcagagcagtcaatcactttttccatcctgtaaatactcataaaacctccttaaatggctacttggaatgctgcacgcatgttgtcaagctcttcttgaggaacatcgtggatgttcacacctccacggcggttctctacgacaatgtacgtcacacgatagccatatttttcagccaacttccggtagtttttcaacgccttggatgttggaaatacgttggagacaacaactgggttgccttcaaccatggcagattctgtgtcacgcagacactggcggtaggcataagccatccggctttcagtccacaaatactcaccttcctcggtgtacagatactggtcgtgttcatactgcttgcaacccaagcagtcagccagcgtctttgcgaatgtggacttgccggaacccggcaagcctcgaattagataaaggtggctcattgatcctccatttcaaagaatttttcgatcactgcacggcgtagtgcttcagatgtttctttccagccgtctttgtgaaacgttgatgtgatgtattctgcaatagaatagaactcttcgtcaagcgttttcaagaactcttctttgttgtcgaacatctggtcaaccttcttgttacccatccgcatcaggaacttcttggacaggtagtgcggcgacttgatcttgcacactgtctcacgtgtagcagcgtcgatcaccatccaaccttcatgcttgcaggtacgcaccatctcccagagttcgccaaaggttccacggaacacttcaggacgtttggccttgataaagtgtgcctctgagtctaaccacgcctctgtcatcatagttccagtgttcatagagcgagcaccgatcagccatgctccttcctcttcttctacgatgtgtgggtcggatggatcacaaatctcgaagagataggtaagctctgagtccatttccgtgtaggacaacttctcgatgtgagagcgagccaacacagcgaagtcagagtccagagagccagtcgtagagacgatcaactcaccattccagtaccggcacgcagccatgaaaccgttcaccttacgtggtgcaacaaccttggtttcaggtgtcagctcagagccagccccgttctcgccgtagttgaacactttggtgaaaggccagatcaccttgttaccttcatcgtcaaggacaatcccacgcgcctccagcagcagagggtcagtgttccagagtgcatcgtagaacaccttgcgagagtatttgaagaccgataggccattgtcgtaacgcttttgttttacaagcccttgggctatcagtgcttcaaacatgtctcagttctccaattgcttttggtggataatgtaggaagtctcgccatcttcaacctcgtccattagctcttcgtagggacgttcaaggtcttcatcaaagaagcatgaaagcacagcggatttgtaatcagtgtagacaccgcaaacacagtcccaacccatttcaacacttgtcacaacgtaaacgtacatatcacttccccttctgttcgataaatggcagaccgttcttgtaggactgctctcgggctttgtcgtactcttcaccagacttgggcttcagcagtcggtcagtaatctctgacctcgaaccttcaaagactggaagttcagtgcgtggtacaaaacccttaggtccgtagcttggctgggccagattgtaacccagtagcaggacaactgcaagcgctgcaatcagcggcttacgaactttccaactgaggtacaacagagcaacaaagacaacgaacgggagcacattaaacagcaataccataatccacctccaaaagaaaggggaggcgatggcctccccaatattatcacttgttcatgttcatgatcattgggacgttagtacccatgatggtgtgtggcagtacaccgttccacttctcagccttgattcgttcaacttccagcgctcgcagctgcatcacacgtgggtcaacactctcagccagagtacgttgcgacatagcctcagtttcagccttctctttctctacagcacgagtcaggcgagcttcttgcagttcacgctccagacgaaccttggagatttgaagctgtgcttcttcaccttggatagcctcacgacgctttgcagtgttctcttgagcttcagtgatgatatctgggaacttgatgttggtcaggcccacatagcgaacattgaatggcgtgcgttcagtcatcaccttagccagcagaatctgaatatcagcgttgatcttctcgttgctggaagcaatctgagagatactgtactgggtcagataggcccgcacttcagcttgcagaatctgcttcgcataggtgttgtagatgctctcactggagatgatcgacagttggtcgtccttcacctgctgtggcagcgagttgaacagctcgttggccttcttctggttgacactcagagtggcccgaacatccagactcacgttcagcttgtcttctgggatgaagatggtcattggctcaacgtaactcttgtccgacacgtccagcagcaccatacgatcacagtaggtccagcagaacggcagtcgcagcttggaagttgggatcaggttgtcctgataaccatctttggtcatgatcttaccaacgtgtgctggcggcacttcaactcgttcgccacaaccagtcagcaccagtgctgccagaccaagcatcaaaccaccaatcagattcttaaacatttgtctctcctttgtttgttttcgttgaccagaattctataactctggccgtatccagtcaagctttattttcaattctctaaggtgatcttaccttcgaacactcggaactcagtgacaatccactgctctccgtaggaaccgtcctcaaggcttacgccgggaaactcgtcaccaaccacaatgccggttgccatcacaatgaatggcggttgctcgttgtggatcatgatcgtacccggacctacgcccggaagcaccttcatctcagagtcaatctgcatcttagccattactcgcgtcctccgtcgtgatggtcaacaacctcaaagacttgtttgtccatatgagccttcacttcgtccagagagaatacctgacgatcagggtgattgtcaataccaacatccagacgcttaccacgtggagccagcgaaccgtgacagtgaccatgcaggtgccatgcaccgtggtgtgccttgttccacgtctcaaaaggatagtgacacatcacaacctttgtacggtcgatagtgatttccttgtaatggcaaacctcgatcacatgggccagattggctttctcaatctcttcccagaggccatcctgacaatggttacccttgataaaggtgatctgaccattcaggctcttgatcagctcgatgatcttgttggctttcttacggccagcgaaggtgaagtcacccagatggaacacttggtccatcagaccaacacgactgttccaacgcttcaccagctccgcgtcttgttcctcataggtccaaggacggttgcagtattctacgatgttcttgtgcccgaagtgcaggtcactcgtaaaccaaatctcactcattactcttctctccttgtctttctgctctagcgccttggtatccggcgagatgcccaaccacaatggcgtagatgctcatgattccaacccataatacactctcgccccaccaaagtacagtgggaattcccatcagcacccaaaagaatgttgccagcagatggaacagcttcatctggcgtgcagtgaccttcacacaacaccttccgtcaggataaacagctgtcgagggtactttttcatacccttctcacctttagctttcaaggcagggttggtgctcccactactggcaaaactctccagtaggtttgccatggtatcacagattttcacctcacgtgccatgttgctgaagatgcagccttccatgtacgcttcataggtggtgtcctttgtcttggtcagacggcgaacagcatcagcgatgcacacaccaaactctcgttcaagctcttcgtaagtgacgccacagtcttcaatcacatcgtgcagccatgcaattgcaacgtaggttgacagaagagggtcacccttcttacgcagtttgacgttctcaacaaccatgctcagatggtaagcgtagggcttgtcaccatacttctggtttccgtgagctttgcgtgcgtaagcttctgctctcgactcaaggattacttctggtgtgagttcaatcatttgattctccttactgagggacaaagaagcccgccttgtgggcgggcatttacacttacaggctcaacagtccctcaacgatcttgttcagaggcttcaccatcggactcatggtaatgagtgtacccgatttgttgatgctgagcttcacttgatcaacaagcttcgacgcttgggccagccgcacaccaatcgtgctgaaaccgctgctcaggttgatgaagtttggaaccgcaacaccattgtcatagacaacccattggtcatcacgcagattgtgcatctttgtagctgtgctgaagctcaggtacttgttagctttgaaagctgggtgttcactgacgaaccgtccactcttgccagtctcgtccagacggtagcccagagcgtacatgaagttcagtacagaccttacttgtactacggttgtgtccagtgcttcgaaattctcagtcatttgtctctccttattcatagtctcggattacaacaccagttgggaactggggaagtagtgtgcctttataccttgtttggtacttcactgtcaagagtttattgactagtgactctttatctttcaaggccgctgctcgttcagacatgtctcccatcacaacttggaattggaggtcgttcaagtcgtttcgcacaacgtaaatgccattaccttgcttgtccggtacaatatccacgatagtgaactcactgtcaaggaattctttgtacttctgaaggtctgcggaacgtttaccgctctcgtacaggcccttgaagttacgaagcatgatgccctcatacccttgagcaacagcctccttgtgcttcaccttcatatctgcttcgtctgcaatccacgagtattgagtgatttggatcagaggcgatacaactggaacacctgtaagctcttcaaggtcgctaacacgctcgtagaagcttctgtcagacacaacgtcgaagatgtggaactcaagctgtggacgtagcttgtgaatctccagcgcttcaccatattcaacgagagcttcagcctgctctttctgagacagcttggaagccttgtcaagcttgcggtttgcagcgtcaacctccgcttgagtgtcagtacgcttcacagcagacacaatgtcctgaagctcgtagccatgcttgtacacctcaccatcccagatatcaccatcttgcatgtgaatattgagagcggcttcaatgtgtggcaggctatacagctgagacgtgcgagactcaagcgtgacaacgccattcttcttctttgccagagcacgtacaccgtcgtacttcacagaaccaaagcacggatactcgatgcgatgaccttgcttacggtagtcagcagccagcatggcgagcacaggaagctcttcaagctcttccttggactcacggtagcccttgtcttcctgcttcttgattcgtgcgttagcctcggagacggcttgctcaaagactgtgcggccttgcttgccttcaaggatgctctcagttttgacggtctgtttgccaccaagctttccatgggatatggtgatcatcgcttcaggcatatcacaatgcacttgctctacttggatagtccaaatcttgaagccgcctttcttgtcgagtccgtacagtgtcttgatcattaataatccgccatttcatcaattcgagcttggagcgccatctggtactcgtacgcttcagtgctactatacagcacgtcaacctcaacactggaaacgtaggcaagctcttggcccaaatctctttcgaccagctcaacgaactcatcaacactctctacacggtcatacgtgtaaaggtagccatcaccagactcagttttcaaatacgtcgatacgattgttacgctcatacttcctcctttgttccatgccatgggcacgatttattgataattttgccggtgccaaaccgctcaatgttgtcaagctctgggcaagtacagcctttgagggtcagccagtgagtgtggtagtcttcgtctcggctgaagccccacaacccttgcatggtgaactcaacatcttgaatgaacgccacagggtcatacttcctcccacgtgggttcttcttcacttcggcaagaaggtcatgcagagcctgcaaagcagcaagctcaacctctgtcatgtcgtccagacggtcttgcagtgttgtcactctagcttggtagtccatattgttgcacctccacgttgtacttctttagatagtcgataccgtcagtcttgcggtactcgtcacgatagacaacacgcttcactccggcacggaccagtagtttggaacattcgagacacggggaaagagtaacatacatcgttgctcctttggttgatagtccttgctccaagcacttgccaagactgttaagctcggcgtgtacaacctctgggttcccgtcaggtgagaattcccattgattaggtccaccactcgcatgcccgttgaagccacccgatacgattcccgacgccagtacgagagcacagcccacttgagtgcggggacaatgactttcgttctcgtaggcttctgcggttgccatgtgcattttgtcatatttcatctcacctccttgattgagtaccgatcacgatactctttaaaagacagttctcggagtgtgctacgccagctgatgacgcagctcgaaatcatgaggacacaatacacctcgccatcccaaccacccatcttctcacgtggcttctctttgtaggcacaccaagtgccgcacggttgttgagcgatccacatcagccccacaccgccaacacttttgtagggttgccaccatcagcgataaagccttcaaggtcgtcaatgtgcttctcttccatctggtactcttgaatgtcttcgacgaaggcgacatctacaccaccaaccttataaagcatctggtggtcgccgggacacaccacatcaaggtcgccaccttcatcttcaatagctttcagcagcagttgtacaaattgactagctttcatcgttttcatcctctagtgatttatcgtgttcacggcagatttcttcttcacaagctgggcacataaacccatctgagccgtaattgatgccatgctcaaagcaaaagtatggttctacattcatcgcttctgacccctgcgtgttgcggttccgaaggcaggcttgctgtcttcaccaagtggtttgcccttctgtaagcggcttgagttgacagagtatctacccttaccatactcgttgtcaacccattcttgtgcggttgctcgctttgccgtgtgtataaaaatgtagtcacccatggcattcttgataaagaatgtggctggtggaatgaagtcccagcgggagaactctttgtagtctacaaccgtgatcttttgcttactcatacaggctgtactcttcacggatgctgtcaacgtaatcatcagcattgtggcgttcaagagcgttgagcagcctttcaaccagagcgtcatacttctgagcaagctctgctgctgcaagcaacgcttcacggtgtcctgctttataggcaagctctcccaattgacctgccgctgtctcacccttttctacaatggccgggatattcataatctcattgtgcaaactcataacacctcctaaatctgggcgaaaaaatggccgactgtcgcaaggacaatcggctcatggggtgaatcttacagatcaaacgggtcttcgtcaagaccttcttcagcttttgcgtaggcatcacgctgtgcttggcgatagacggcataagcactgagacgttgagcaagctcttcaccttcaaagtacacctctttaccgtcgattacacgttcaatctcatcgtcgttcaggaagcctgcatacgtggtacgcacgaaacgattgatcatcatgtcacagtggtcaacgttagccttgacgtgtggtgcgataccaacgtagccgtagctcgctgtgtggatcatgaaagaggacatgtcgtcaatctcccattcttcgcacgccaacgctacagctgtagcagcactggcacaggtaggaccaatgtaggcgattgtgtgagcagcagtgttggacaacgcacgacacagcaagtgcccagtgtccatagagccacccggcgaacagatatcgagcctgataacgtcacgctcaccagcacaggcaaacagctggaactcgtcttcaaagtcgtcagcactctcgattgcccgtgtaaatcttacagtgtattcattgtttacgtattgattcaccagaatacgatttggctttacttggaattcttcgttcatttgccctccctttcatctttctcaaatgcgatgatccactgcttacaagcctcagatcgttcaatgtcgtttacatggttgaagtcgatgaagccaatttgcaagtgactgtggcgtgaggccatatcagttagcatcttcaaaccactgtgtgatttcagggcgctctgactaacgtcaccactgataaccatcttgcaatccttaccttgacgggtaacgatgttcttagcctcttcttggttaatgtcttcaccttcatcaacaatgaagaagcagcgttcagctgagaagcctttcagcacttcaagaggtacatactggatgttaccattctcaatggctgtttcgagtccacccggcgtcaggcggtccttcaggatgttgattacaggcatcaaccacatttccatcttctcaatggcgctgcctttgaacataccaagcgatttactgttggagatgttaggacgcacgaatacaatcttgtcaatctcacctttgagataggcatcacatgccatgacagttggaatgtaggtcttggacgtccctgcgtagcctgtggcaatcgtcagagggttttcgttgatggactggatgtaacgtgcttgtttctcgttgcgtggcttgagcggctttgtatcgtgttgtgtgcgaccttcatcacgggcttcttgaaattttggtttagtctcacgacccttctcttccttcttctcccaacgagttccaaccacttgtgccttattacgctttgccatttgcacctccatgaaataggggcacaaggccccttaaagttactcagctacttcttcgctttcctcggttgggatcaacacgctaagaatacgaatacgttcttcttgtacggcgtcactcacttcatgtgaggcaaccagcaccttgttgaagtcttcactcttcatgatcttgtctacacgcttgatagttgcaaagtctgcacgctcaaggaatgctgtaccgacaatctcagtgtaagctttcaggtcaaccatctccagaagctttgcagccaaatctggcgtcagctccaagccttgcgagtgtaggattgggaacagggtgttgctcaggtcgttctttgcaaagtcgtagaagaactcgtattgtgctttagttagttttgccattattcagcctccagctcgtctttggttggctcagccttcaactctttcttagcagttgttttctttgctggagctttcttttcttctttcacctcctgcttggctggctcttctttgaccagttccatttcaacgctcttcagacctttctcgtcgaagaagtgttggccgttatctttgaacttgtaaccagctcctacgaacgattgtagcagcaacatgaagtgcattgggtcatagtgttcaaccttgccgctgtggtccttatcgatcactgtggtgccttttggctcacctttgaacagcctgatctggttgccgtacgcaccaaactgtgggtaaccgggaattgtgttttgcacgctgtagcctttggcaatttgttcggctacagtcttgacgaacacgattgggttgtgttcaactacgtcgatgaagtcagtcattggggtactcctgttgatttgattaatcctgatagtaccacaaaatatgcgtttgtcaagcctcttgacgtagagcaaatgtgtggtagtatggaaaaactgatggagagatatgtcgttattcactcaccggccatcagggaacacgcctatgaagaggatgctactgggcaagctgagtctaatctgtttaaagcgtagcgacgacgccgtaaggtggaatgaacagaacctgagccattggctctccagcacatgctggccgaatgcaatctcaatctacgagaagcatggaaggtagaccaaggttacgtcttaggctgattcgctcagtatgacgtttccttgggacagtctaccttccgatacaaaactcatctacgagatacatcaagatcaataaccaatacatacaaccacctaaccaaatgatagataaggagattgtatgacataatctacaaaccataaggaaaccaatatgagtcgatgcaaatgctgcgacgtaccaatgatcaataatgatagccccgcatggaataagctcgccaataaagaggaagacctctgtagtgtgtgcagaagccttgtgtataactcgtatacagagcgagagtacgtaggagggcgatatcctgtggatggtgtaacaggaccagtgccattaagagaaaattaattgaatcaggggttgacagacggtgcaatcatggtatacttatggtacttagatagaaatgatctatcgtataagttacgtgagtggagcatacctgtttcctcctcctttcgggtagtaagtctaccactcacatctaattgaggtaaagcaatggaacagagaaataaaggtggtcgccctacgaaagctgaaatggctgcaagaggtgtgacaaagactgagcttgaggctggtcttagaattcttaaaaagatttacggttcagctattgacaagatgattgaaatcagcgatagtagcgacctgtcagacaaagagcgattcaagatgaagcaagagcttgtgatgatgtatatcaaccttgttaaatctgatcaagcattgaagatgcagctcgcaaaaggaacagaaggtgagattgaagatacgagtgataagccattggctcccgtattcaattttgctaaatgataattggacgctaattcaactggctagaataaccggcttttacccggtaggttccgcgttcgagtcgcgggcgtccaaccaaattatagtagattggctgagaggtgttatgaaagaatgtagaggctgtaaacaaacaaagcctctggcagacttctcggctcacgctggtttcaaagatggccgcaactcgaaatgcaagctctgcaaagagcttctgagaaaagaagctgttgcagctggacgacagagaagtcacactccctattcttacaagaaacagttgaagagtaggtatggactaactcaagagcagtatgaagttatgctagaagagtgtagaggcagatgccagatttgcggagagagtaagtctctgaatgtagatcactgccacaccacaggcgtagtacgaggacttctctgtacagcgtgcaacacagggttgggtaagctgggagattctgttgaaaggctccagctagccatagagtatttggatggtaaacctgcaaggttgcaggagccgcctgctaagcgtactgcctgagtaatcgggtctgtttcgactacagtgccatcctccagaatgatcgtgtcgctcacgatatgacaaacactagacagtgagggttctgctgtctcttcacggagtggtattgaggccactcattggggtaagagtccccacaggcaacctctaaatttcggcgggtagcaccgatggcggtacacagtcttgaaaactgcgccactggttagtagccggtgagggttcgattcctttacccgcctccaaacaaaagggcctttgacgcaattggaagacgtagctccctcaaaaggagaatgttgtaggttcaagtcctacaaggcccaccaaatagttgactcatagtgaaatggttatcacactggtctttgaaatcagtatttcaggttcaagtcctgatgggtctgcccttatgaaatctaacctccaaggagagttgatgagcgacaagaaacaaagacagcttggtatgaatccaagcacagcaagtggaaggcttgttaaagacctgttgtggaattttgttaagactactgggcaagatgcctgttgcaagtgtggatttccaatgtcaagagaaactttctctattgaacatgtgactccttggttggatagcgacgatcccgtgggtttatactttgatctgggtaatatcagttacagccatcttaggtgtaatgttgaagatggcagaccaaggaagtcagataagccctgtgggactagggctaagtataaaacgggctgtggctgtgaggaatgtcttattgctaaccgcacctatcaaagtgctcgatacaggccagaagtaagagcagaaagatatcggtccacaggactttaatagtcctgatgggtctaccaaatttgaatgtaagctcaatcggtagagctacggacgtatataaatccgtgagtgttggttcaagtccagccattcaaatcaaacataccgcgccttggtatgatcaccaaaccaactggtgataaactcataagttcagagagtataaacaggctgaacgggcgtgcataaaccgactcatcagcatagagtcccagtagcatatggtaagctggatttgacgctcagacggcagcgtgttataaatgccgtcctcgaattatgtctgagtctgctaacggcaagctgctggcctccaaagccatgcgatctgggttcgaatcctagctcattcgccaaatgtgagatgtggctatagcaggttcgatccctgcactccgcgtaatgcagagtatagatggaatatagtggcaagctcaacagggagacgaagacgatactagtcagtcgtaaatctcccggtactaattaatgtgcttgaagctcaattggatgagcaggagatttctactctcttggttgcaggttcgaatcctgtcaggcataccagtgcaaataaacgcttgacaagatcaaattgtcgtgtttaaatactcaaatgaatcaaacacaaaggagagatacaaatggcacaacgtccatatgatgcaacaaaagaacacgctccagttgacaagacccgcttgaaagacagcaaaggtcgtcatccgaacaagggtcaaaagaccaaacacccagtgtctggtaagtaattatgatggtttggaagcctgttgataatctgctaggttgttccaaatgcggttatgcctacagcagccactaccacagaaattactgtaagtaagtttttaatgctcccatcgtctacgtggtttaggatacgaggttttcaccctcgtgaacggggttcgagtc

SEQ ID NO: 4 - DNA, 40665 bp, unidentified
  source 1..40665: mol_type = genomic DNA
ggatgatccaattgattatctcaatgggcctcaatggccctcatagggaatctcaatgggcctctatctgtccctatctgtaagtcctccttgagttccctataagtcatccataggcttgacactgagaccatccataggctatcgcgtgtatgcgctcataaggacccctcaaagactgtctacctgataacccataggatcaggctccatagggatgacctatcagctctcaggcaacgatagaaactcagttgttgacgacccatgattattcctgtctaatggctcccatcaacggcaaacacggtgtgattaacaccacttgagttgatcgccacggtctctggccttggtcctaacggtctcactgagatgaccatagggatcgacaccagagcctataagggccacaagctgggtcgggcaatacttcgagttaccctaaagcatgtgagtagcaacaagggctgaaacaaacgcttgacaggatggtgaaacgctgtagaatgaccaccatcaacaacgcaacacaccggcaacactgagatgctcttacaggtctcgaaagggcaacgaattggctgatagacacggcctaacgggcacccttacgctctttaacaactcggaatgctacaccacgcactgagccggtctcgcctctcagggcaaccatagggaggctgtaggccctcggtgcgtggcagtgataggaaatacagcaagatggtcttgtgtgagccaagcagtagctgggttaccagcagtccacgcaaggagtcagtatcaggaccatcgtctgtatctcccgtaaaccctcactgaaggacgcacgctatgagcattgcaactgacaagctcaaggaccagcttcacgaactggagcagcgcatcaaggtagcgatcaacgaacacgagcaggcaaagagtgccttcggtcgtcttgaagtccctccttcgcatcctatgtggggagtgtttcgggaccgtatcgactccactctggtacaccaaagggtcctgcaagcgctctggcatcgcactaaggctgagctactcgaacgaatgaacgctgacaaggagcctgagtaatggcacaccggaagttctctgagctgtcgaacggtgacactggccgcatcgccaaggtatacaccgatggctgctggggtgagtacatcgtcaagtttcaccatccaaagaccggcacaacaaggccgctgactatcacaccagcgaccgattggacgcactggacaccgcacaacactggatcagacaacaggactgacatcatggcacgcaaagtaacgcaagacgctgtaaacgcattcatcgctggccgcactggtagcttcggtggtaacaccacggtcgaactctctccactcggtgaggtgatcgttctcaagctccacggcaacgccattgcacgccgcgacaagggaccaatgggcacctttgaggtttgcgacggtggctggtcgagcaacaccaccaaagagcgcctgaacggtctaccgggcgtccgtgtgaaccaaaaggactacgcatggttcctcaatggcgaaccgtggaatggcaactggaccaccatcaatgggtgaccattcactcaagggcgctcgctgagtgtcccttggggaagcaatcacgcacaccacaacgcaccaccaacaatcgaaggtagcaccatgtctaatcgtcaactgcaattcatcctcgctcgtgccgcttgcctgctggtcgaggcatacactaagtgcatcgctgagtaccgcactatcctcccactggatggccgcattggtctggacgcaccgagcaccttcgagggtctcaaagcggacgccgctaaggggttcctcaaggtctccactgagttcaacacgtcgagcatctacggtggctctggcaacctgactttccgcaccttccatgacttcggtcatctgctgtacaacaaggagttcacgctgactgacgaagtggaactgtcgcgcatccaatggcaggacttgaagggctatctccctgccgagtgggtggacgtgtgccactgcgtctatgtcgctgacactgagcagcaatcgctgtacgaagccgagacgggcaacttcccggctgaccagaaacgctttgtcatgggcttccttgccgatcacttcgcttaatcaacctctgagaatcaataggtaaaagcaatgcgctacaatcgcaccaacttcgtgtccgctcgtgtcgtaacgagcatcatcaccgccatccaagcggtaatcgcttcgggcatccctcagtacatcgaggatcgcaagggccaacgctggctccgtgtggctctcaagatgctggacggcaagcctcaactggaattctttgcccgcaatgggcaggaagtcggcgacgtgatcttgcaggcgtccttcgattggcacgctgaagacctcaccgagttctctcagttactggtcaaagtttatacaatgaccgagctgcctaccacacctgcccgaccagtggaacctaaagttgatccagagcctgccgttaacctgccttccggtctcgtttcgtggcgtctgccctctggcctgaccctgtacgggcactggcggcgcaagtggttccgcaagcgcttctatgtgacccacgaccgcaacggccaactgccgcaaggtgagggttactacctcgaccctgaagccatgctgtatggcacctgccaaggggtaatcgcatgagccgggtccttgaccatgctgtaaccggtatcgcatcggtggacaagtatcacccgctgctccgtgaacatctcccgtacatcaaggagatggccgaactcgccgagacgcaaggcccaatcactgcggcctgtttctctgagtccagcggtttccaaaagttccttgacgattgcgtggtgtgtcatgcaccgggcgtctactcggtcgcttacctgtcgccacggtactgcgctgagattctcaaggaagtcaagaagttccctcacacggtcaacgatgaggaacccgaggaagcgcagatacccgaggtggtctttcagaacgagcacccggttctgttcgaggtcttccggtccttctgggcagacgctggcgtgacactggcaaaggtgctgctcggtctcgaccctgtgaacctgaccacctgccaagccgctcagtacgtccctacgggcatctcaaggggtcactggcacatcgaccaagactctgacgtaacgctcgtggtggccctcaacgacgaccacaagggcggtggcacgatggtctatcggggtcccttcgcacctgctgtcgaggtccctcagaacgaaacgggctgggcaatgctgttctgcggcaagacgacccagcactacggaatccctgttatcgaaggcgagcgcaacctgctcgtccactggagtgagatcaagtgatgcacacgaactaccaaccggcacgccgtgggctgctggccgagcggatcgccgctgagaaggaagctgcaatcgacgcgaccatgcgtcacccagaggcaaaggccagcgtgatgactgccatgtatggtggtcgccgcaccatcggggcaatcgctgtggcttcccgcttcggcaacatcgctcacattcagcaggctatgggcttgcgttacagcgaccgtggcgacttcacccgctgctatcggggagggttctgacatgggaccaatgcgaatcgcgccaccaccgaccaatcgcgtcaaggaggtgacctttaaggtctctcgcccagacggccaatatggtctccacaagctcgctgacaccacgttcgcccttgggctgggtccctgtggacgctgggtccaacgacttgaggtggaggttacagaccacctgctgaggattcgccagcactccaccgagttcgacatcaccgaggcagccgctgagaactccgaaagtgaactcatgattgcgcatcaccaaggccgatacccgtgtctcaagaaggaactctcggctgacctactggagtttcacaaggagcgatttaacaccaccaaggcgctcttgcgtaaggcgaatgaaggctacgagatcaaggagtttatctacaagatcgcagacattcatggtcggatcgtaaccacaaagtaacgctggatttaaaaaccctcactgtggctgcacacactatgggggcttttatcttaaagacatctcaaaggtcatcttaaagaccgtccgtgtgggcagctcatcgctaacccattcgagacgattaaatgaccattgcaattcccgaacgtcacgacttcagcgacatcaattcgtctgctgctttcgatgccttgagcaacatctacggtcctgcactcgctgctgagcaactccagctcgaacatgaggcttacaccctcggcgaagaacggttccacaaggcaatggaacggcagatggaacgaggtgagttctccaacagccaagtagcgaaaccgctgctcggtcatctggtgccgatgttgtccaaggccatcacggattggatcgaacaccagaccaccaaggttcgccgcaagcatgtggcccttggggcgttccaacagatgaacccagagacgatggcaagcattgtcattcgctggaccatcaaccgtatcgctcaacgctctggcgctccgaccatcactgagatggctgtgagcatcggtggtgcccttgaggaagaagcacggttcggtcgcatccgtgtccttgagcaacagcactaccagaagcacatcaagaaggccctcgcccagcgcaatgggatgacctacaaggtcgcctacatggagaaggtcgaagcccacatgatcgaggcagggcagctcaacgagccttggaccgagtgggaccagtctggcgcagatgtccgctaccacatgggcatccgtatgctggaactgctgatcgaatcgacccagcttatcgaggtcgttcgtgagcacaaaggcaacaagaagctggacggtgagtatgtctacctgaaagcggaatgggccgacaagctccagagccgtgcgtacatcctgtctggggtcttcccgcgctaccagccaatggtcgtgcctccgaagccttggaacggtgtgcgtggtggtggctactgggccaagggtcgcaagcctgtgaccttcatccgtgtcccgacaaagcgagcgctcaaccgctaccgcgatgtccacatgccggaagtctacaaggccgtcaacctcgcacaagcgacaccgtgggcgatcaaccagaaagtcctcgctgtggccaacgctgtgatgtcttgggagaacgtgccaatcaaagagttcccctcaacggaacgtgaagccctgccgatcaagccgggcgacatcgagaccaacgaggaagccttgaaggcgtggaagaaggcagccgctggggtgtaccgaaaggacgccgcaagggtctctcgccgactctcctatgagttctctcttgagcaggcaaacaagttcgctgagtacgatgcgatctacttcccgtacaacctcgactggcgtggccgggtctatgcgatccctgcgttcaaccctcagtccaacgacatgaccaaaggaatccttcaggctgccaaaggcgagccggtgggcaaggacgggatcgagtggctgatgatccacggtgcgaactgtgccggggtcgataaggttgacttcagccagcgcaagcagtggatcaaggacaacgaggaaatgattcttcgctgtgcccatgacccactcatcaacaccgactggatggacatggattcacccttctgcttcttggcgttctgcttcgagtggcaaggtgtgaagctccacggggaagcccatgtgtccgccctaccgattgccttcgacggttcttgctcgggcattcagcacttctctgcgatgctccgtgatgagcgtggtggtcgtgctgtgaacctgctcccaagcgatgacgtacaggacatctacaagctggtctcggatgaggttgagatcgcccttcagtgggacttgaagtacggcaccgaggattccacggtactcgacaccaaagaggacaccggggagatcaccgagcgtcgtgtccttggaacaaaaaccctcgctatggcgtggctcacctacgggatgtcccgaaaggtaaccaagcggtctgttatgaccctcgcctacggatcgaaagcctacgggttcgccgatcaggttcgtgaggacatcgtgaagaaggccatcgacaacggtgaaggtgagatgttcaccagtccgggcgaagcgagccgctacatggctggcaaaatctgggactctgtgagcgtcgttgtggtcgctgctgtggaagcaatgaactggctccagaaggctgccaagctgctggcctctgaggtcaagtgcaagaagaccaagcaggtcctcaagcctgcaatgccggtctactgggtcacgcctgatggcttcccggtctggcaggagtacatgattcccgagacccggcgaatcgacctgatgttcctcggcgacgttcgcattcaagcgaccgtgactgtccgagacagcgacaagattgacgcccgcaagcaagagtcgggcatctccccgaacttcgtccactcgcaagatggctcccaccttcgcaagactgtggtccacgctgccgagcggtatggcatcgagttcttcagcctcattcacgatagcttcggcaccataccggcgaaggctggcgcgatgttccgagcagtgcgtgagacgatggttgaaacgtaccaaaacaacaacgtgttggaagacttccgcgagcagttcatggaccagctccacgagtcccagcttgacaagatgcccccgatcccgccaatgggcactctggacatctctgaaattctcaaatcccaattcgcattcgcttgacagaaggaaccaaacaatgttcgcacgcaacttcgagaagaccaccaagaccaccaaacgtcgctcctacagcgagcacgttgaagcctcggcgcgtactggcaagcgtaacaagccaacccgtggaggtaagcatggataccaagagttcgacgacgcacgctgagtgcatcgagttcaccggatacaaggatcgaaatggatacggcatcgtctcagtatccggtaagaacaagagggcacatcgagttgcctatgagactgccttcgggcaaatcccagcgggccttgtagtccgccacacctgcgacaacccttcctgtgtgaacccagatcatctacgaactggaacccacttagataacatgcgggataaggttgatcgcgggagacaggcgaagggagactcaaggtctaactcgaagttgaacgacgatgcagtgaggttcattagaaactcagaattgagaaactcagaactcgctgagatgttcaacgtatcccgtccaataatctcagacgttcggcgtggtaagcgctgggcgcacgtccaataggagaccaatcaatgcaagtgaccatccaagcaaccagttccgtgattgacggtaacatggccctgatcgagaccagcgtgaccatcggtgaggctgtgaccaccacccgtgtcggctatgaccgccaagaactgctcgacaaccgctatctctcgggcaccttcgaggaacgtgttgaagccctgcgccagtccgctgagcgtatgaccgagaccagcgtcaagctgcacttccaagcgctcgccaagattgcctcgccagaagctctggtgactgacgtggccttctctggggtcggcgtcaaagccactcaggaactcgctgagaagatcgagcaggctcttgaggaagactcgaagcccgccaagaagacccgtaagccacgcacccctaaagccgcccagtaaggagcaacccaatgtccaaagtcgaagccgtcatcctgaacaccaagccgttccgcccaaccgactacaacgagaaagccatgcaggccgtgctcgatgagtcgtacctgcaagtggacgtgaagaaggatggcgttcgcctcaacctgtgcgtctccggtcgcgctccagtggtcaacgtcgagtggctgtcccgtgagggcaagcgcttcccggctctgatccagtacctgcaaggggacgagcgctgggccaagttctacaacccgcacctcggtgaagccctgttcaacgacgaaggcttcatgctggacgctgagttgatcctgctggacgaccacggcaacgagaagaagtgcaagaacacctcgggcgatcttcgccggaaggacgagccggtgccgctgaaccgcatccgggtctacgtgttcgacatcgtgcctctggacgtgatcgctgagggcatcgagtacgatgtcatgcagtgtgtccgtaagggccacgttgagtaccaagtcgccaagctcaaggaatacttccccgagatcgactggatcgtcgctgagacctatgaggtctactcgatggaaaccatgccggtcattgagcgcccctcggttgacgaggatggcaacgagatcaccgtgacccttcagccaccgctgagcctgacacacctgtacgccactgtgcgtgagcgtggtgaggaaggtctggtctgcaaggacccgatgggcttctatcgtcgctccaaggtgagcggctggtggaagatggtccctgacgacaacgaggatggcgtcattcaggatgtcatctggggcacaaaaggtctgtccaacgagggcagggtgatcggcttcaaggtactgctggagtcgggccatgtggtcaacgcctgcaagatcagccgcgcactgatggacgagttcacggacaccgagactcgcctgcccggttactacaagggccacaccgcgaaggtcacgttcatggagcgctaccctgacggttccctgcgtcacccttcgttcgattccttccggggaatctccagcgccaccatcaaggagtaactcaacgagcctcatcgacttcggtcggtggggcttttttgtgctcgtcacgataggagaaatctatgggatggaccgttctgatagtcgcttggaacctgctctggatcgctgctgtttataggttccgatgaccgaatttaaaaaccctcactttggctgcacacatcgaacaacccaaaggaggttcacatgacccaacctgtactgcttcacagcaacaaaggaaccgggcacttcaccgtgcgccaagaccgcgagatcgttaaatggctgggcaaggttccattccatgccgttctcattaacccggtcggcaccaagttcctcgtcaccaagggcacctttgcgcaatcccgaaagctgggccgcattgtgctcaaaccctacaccggcaagttccctcgctgtgccctcgtctggcagatcgtgaaggaggtcttcgcatgagccgggtgattatcgctctgacttctgagcgtggtcgctcgggcaaagacaccctcgtcgagctgctccgtgaggaaggcttcgaggtctatcgggtcgccttcggggatgtcctgaagcaccagtgctcgctcgtcctgactgactgccgtgaggctcagatcgtcatggagagccacatgcacacggacctgaaggatgccaagttcgaggaactctcgatcaacaacatccccgactccgagtacagcgactggctccgtgagaacttctgggacgacaccgcacctcagtcgcctcgctggcatctccagcagtacggcacgggcttccgtcgcaactacaagggcgagcctgacgtgtggcttaacgagggcctcaagctcatcgagaaggccccagaggattccctcgtggtcgtcaccgacatgcgccaagccaacgagtatctggcccttgagggtctcggtgctcatctggtgcgcctgatccgaggctggccaatcgaggctgtggactctacgccacttcacgccaccgacatcgagctgcgcgaccacgttatggacgccgtagtgaagaacgaatggggctatgccagtgacatgctggtccagctccgagcacaaggagtaatcgaatgaaacgagacaccaagatgaagctgttcaaggccaccgtgaagttccgtggcgagatgcaggaagtgccgatctgggctgaatccatcgagaccgctcttgaagtggtcgatctggaatacggcgaagacaacgtttaccggctgcgcccagaggtgacgttatgaaccgcgcccaaggcaacacccggtcgatgccagatggcttcctgcacatccagaacttcaccgtgaccaaacactctggcatggccggggtcgtctacatccacctgatgaccaaggaacaacaggagatcgttgagtcccttctggtcgagcgtgcgacggtccttgaggccatcgctgaggatgctggcgtgcccactgaggtcgtccatgtgaagcacggctgcttccggttccgcaaagagttcctaaaggagaacttccgtgaggtcgttcatgcgaccaccaagatcacccgccagccagtcattgaggacttcaaagggaagctgatcgccgagcgcgaatcgctctcctattaaaaaccctcactgtggctgcacacattcccaactgattcaaaggagacaatcacatggcaaagtccaccaagcaattcctgttcactccagtcggcaccgctgagccgtactgctcgatccagaagcctgacttcggcaaccctgagaagggcttcggcaaccctcgtggcgtctacaaggtctcgctgaccattccttcgcgtgaagcccagccgttgatcgacaagatcaccaaggcttacgacaagaactgggctgagatcagcgaagcgtgggagaacggcggtcgtgctgctgctcaagccaagctggcccgtggcaagaaactgctggaagcctatcagggcgagctgcctttcttcgagaacgaagatggcaccgtcacgttcaagttcagcggctatgcctcgtacaaggaccagaagactggcgagaaccgcgacatcgttctgcgtgtcgttgacgccaagggcaagcgcatcgaagccgttcctgccatcgctggcggttccaagctgaaggtccgcttctcgatcttcccgtacaccttcggtgccgttgttggtgccagcgtgaaactgcaactggacagcgtgatgctgatcgagctgcgtgagttcgctgctggtggtgacgactgggccggtcaggaagaagaaggctacgaagctgctgacgaccgcgaagaaggctggcgtggcgagcaaagcgaagaagacgaagactctaaccagtacggctcgggcgacttctgatggcttgccaactattcactggctgcctcaattcagacgggtacggcgtggtgaaagttggcggcaagacgaagctggctcaccgagttgccttcgagaaggctcatggggaaatccctgtgggcctcgtcgtcatgcactcatgtgacacacctgcctgtattaaccctgagcatctaagcgcaggaactcaacaacagaacgtgaccgacatgatcgagaagggccgcaaggcgatcctaaaggggtccagccacggcaaggcccggctttccgatgagcaggtcaaggagattttcctatcgaaactcagtgattccgctttagcaaagcagctcaacatcaacaggtcagttccttggaagataaggaagggccaactatggcgtcatcttacggagggcctcgaaacgcccgagtaggagcattccgctctggactcgaagaccgaaacgcgaagcacatggacaagctcggggtcaagtatgacttcgagaagttccacatcaactacgtggtgcctgcaagggacgctcgttacacaccagacttcatcctatccaatgggatcatcgttgagaccaagggaatctgggaagtggacgatagaaaaaagcacttgctgattcgtgagcaatacccagaccttgacattcgactggtcttctcgaactccaactcgaaaatctacaagggttcgcccacgtcctacgccgacttctgcacgaagcacggcattcaattcgctgacaagttggtccctcgtgactggctgaaggaggctcgcaaagagataccccaaggggttctcgtaccgaagaaaggaggttagtcatggccaaggttcaattcaaaccgcgtccagccacggacttcatcgtggttcactgtgcggctaccaaggccagcatggacataggcgtccgtgagattcgccagtggcacgtccagcaaggctggctcgacattggttaccacttcgtcattcgtcgtaacggcaccgtcgagaacggtcgtcctcacgatgtcatcgggtcccacgtcaagaactacaacagccgagcgctgggcatctgcctcgctggcggtatcgacgacaagggtcaaccccagaacaacttcacgcctgagcagttcgcatcgctcaagctactgctgatcgccaacaagcgtcagtacccgcaagcccagatcgttggtcatcacgacctcgactctggcaaagcctgcccttccttcaaggtctctgactggctcaagacggctggcatttaaaaaccctcactgtggctcacatggattcgttccgtgtgggcctctttgcgttgactttaggaggacattatgaaccgttccttactgcaaggcggtttcgacctctgtgagcatctcattggactgggcatcggcgcgatcatcgctggtggctgtgcccgtgacctgttcttcggggtggaaccgaaagacatcgacatcatttgcgcgggcagtgacccggagacagtttccagagcgctcgatgaaggtggttattcctacgagaagttccccaagtaccacaccgggtctgactcggatcggctgcaaggggtctggaagatcgaaggctcgaacatcgacgtgatcctctacgagaccgattgtgtctccgaggcgatccagaagttcgactacaacctcaaccagttcgccatcactggcatccaacggggcatcgaaggggcgaccattcgcttcatgggtgcgagccattggagcaaccttgtgagactccgtgaggatgctcgtgggtcgcgtgccgagaagatggaagccaagtggctggccctgatcgacaaggctccaaacgtggatgagcgggaggtggctgatgtcgtctcctgaagaaagcgaaagcgtattcctgaagcacatcccctgtgagaactgtgggtcttcagatgccaactcgcttttcagtgacggccaccagttctgctttgcctgcgaccattacgtcaagggtgatggggagtcatctggtgagcgtgtccagaaggagcgcaactctgactgcatcgagttcgccaagtcccaaggtcgattccaagacctgccagctcggttcattcaggaggctatctgccgccagtatggttactgggtcggtaaggtctggcacccgatcaagcgtgaagtggtcatggctcaagtggccaactactacgatgctcagggcaacctgacaagccagaaggtgcgggacgccaccaaggagttcttcaccgctggagcacacgacaaggacgctctgttcggtcgccagctctggtctggtggtcgcaagatcgtggtcaccgagggcgagatcgactgcctgacagtggctcagttgcagggtggcaagtatccagtggtctccattgggcacggctccaaggcagcgaagaagacctgcgccagtaactacgaatacttcgacacgttcgacgagatcatcctcatgttcgacatggatgacgctggtcgggcagcctctcaggaggccgctgaggtactcccaccgggcaaggtgaagatcgctgtccttcccttcaaggatgccaacgagtgcgtcaagcagggcaacgccaaggctgtcactgacgccatctggaatgcccagccgttcgtacccgatggggtcgtctctgcgaagtccctaaaggcccgcttgaaggagaagaaggtgatcccttcgcttcctctggtggcccctcacgaactcaagaagatgaccaaggactgccgtggtggtgaggtgatcctcgtgacctctggtagtggctcgggcaagtccaccttcgtgcgtcagaacgtctacaacctgttccacaacgagtccattccgtgtggcgttgccatgctggaggaagccgttgaggaaaccgttcaggacatcgttggcctgcacatcggtgctcgtgtccgtcagaaccctgatgagaccactgaggaagtcttcgaccgcgccttcgatgaaatcttcgagagcgacaagctgttcctgtatgacgcctttgcggaagccgctgaggatcgtctgcttgcgaagctggcctacatggtcgaggccgaaggttgccgggtgatcgtgctcgaccacatctcgattgtcgtgtctgcaatggacggcgatcaggatgagcgtaagaccatcgaccgactgatgaccaagatcaaggcatttgccaagaccaagaacgtcgcagtgttcgtgatctgtcacctaaagaaccctgacaagggcaagcctcacgaggaaggccgaccaatcgtggtcaccgatctgcgtggctcgggcggtctgcgtcaactgagcgacaccatcatcgcgctggagcgaaaccagcaaggcgcattccctcacatcatcctgttccgcgttctcaagtgccgcttcacgggcgagacgggcgtggctggattcatgcgttacgacaaagcaactggtcgcctcgaaccaatgccggaaggctggaaacccgaggacacatccgaagccgatgaggcgtggaaagaccagcaagaacccgacttttaactgaaggagaaccaccacatgaaagcactgaaatcgttcgacatcgttaccgctctgatcgttctggctggccgcatcgccaagcgtcgtcacgagaagctggtcgcccgtgaggcgtccctgaaggctgccattgcggctacccaagctgcctatcagcagaccgtctcggatcgcgtgcaggccgactggcgtcaccaagacatcacccgagtgaagtaactcaaggggtcctttcggggaccctttcggttaactcacacgccactcaataggagatacaccatgaaccattccgacatccgcaagtacctgaagcaaggcgagcaggccgtcgatgttctcaagtcgctgggctacacctacgtggccaacggcaaagagcaccctcattgggtggcccctgtgaatcctctcgacccgatcattgagggcatcaagtcgatggtctccgagcaggttgctgcgaccatcaaggaggaaacctcgaaggcatacctcaagggcgaagctgacgcgatccgcaacaccgacctgcgtggtcctcaatgggactccgtgaaggacctcaagggtctgccgttcagcatcatggtcgccaagattccgagccactcgaaactccacggctactcgatgacccacttcaccaatcggcagttctcctgccttgaggtgcgctaccaccgctcgcctgagtacaccggttatgccgtgttgttctcgttccccgtgcgtccattccaccctgagactgtctggctcccactgagcgcctgcgtcttccgtcgataggagggcaaccatgctcatctctgacatcgaaacgaacggcctccttgagaccgtcgataagttccactgcgcgaccattcaggactggttcaccggccagtacacgcgcttcaatgaggccacctttggggactacatcaaggccctcgaagctgaggctgcgaagccggatggtctcatcgtgttccacaacgggatcaagtacgacatccctgcgctggacaaactgaagcgtcaatacttcggcaagcgtctgaacatccctcgcaagaaggtgctcgacacgctggtactggtgcgactgatccactcgaacatccgtgaccgtgacgctgggcttatgcgctctggcatcctaccgggcaagatgttcgggtctcactctctggaagcgtggggctatcgcctcggtgagatgaagggtgagtacaagcacgacttcatgcgccagctcgaagcggacggtggcgtctacacgccgggtctcgaatgggctgtctgcaaccaagcgatggaggactactgcgagcaggacgttcgcgttacctcgaagctccttcggaagctcatggaggactcccactacttcgtggatggtcaagccattgagtgtgtccgtatggagcacgctgctgcatggacgctggcccagatggagcgcaacggtttcccgttcgacctcgaaggtgctgagcgactctatgcggaactcgcagggattcgccaagacctgctgaccaagctcatcaagaccttcgggtcgtggtatcagccgaaaggcggcaccgagcagttccgtcacccggtgagcgacaagccgctggagacgtggaccaatgggccgttcgctggtcaagccattcctcgtgtgaagtatccgaaggtcggtggtgtgtacaacgccaacggtaagaccaaggacaagcgcgagaccttcgctggggcaccatacaccccggtcgagttcgtaaccttcaacccaacgtcacgccctcacatcatcaagatgctcaagaaggctggctgggaaccctctgagttcaccgacaacggtgctccgaaggttgacgatgaggtactcgaacacgtccgtgtagatgacccagagaagcaggcagcgattgagctgatccgcgagtacctgatgatccagaagcgcatcggcatgttggctgaaggcgacaacgcatggatcaagctggtgggtgaagacggtgcgatgcacggttcgatcaacccgaacggcgctggtactggtcgtgcgactcacgcatacccgaacatgggtcaggtcccttctgcgagtgccacctacggtcctcactgccgtgcgctctttggggcgacccatgcgaagaagcgtaagggctgggagaaggtcgtccaagtgggcaccgatgcgagcggccttgagctgcgttgcttgggccactatggggcacccttcgacgaaggccgttacgctgacaccgtgctcaatggtgacatccactgggtcaacggcaaggctgctggcatcatcaagttcgacgagcgtgataagcacaacgaagaacatgagcgtgtccgtggcatcgccaagacgttcatctatgcgttcctctatggcgctggtgatgaactcgtgggttcctttgtggggggcggtaagaaggaaggcaaggccctgaagaaagacttcatggaaaacaccccggccatctctggcttgcagggtgcgattgccgaccagctcatcaccgagcagaagtggaaccaagcgacacgccgtttcgacatcaagtggaagcgtcgttggcttcgtggtctggacggtcgcaagattcacgtccgctcgcctcactctgcgttgaacttcctgctccagtccgctggcgcaatcatctgcaagaagtgggtcgtcgaagtcgaacgaatcctcatggaagaacatgggctttaccacggctggtacaaggacgatggcacgcccggtgacttctgctacatggcgtgggttcacgacgaactccagatcgctgcacgtacacccgagatcgctgagatcgtcgctaaggtggcccaacaggctatccgcgaagtgggtgaatctttccaattccgttgccaactcgacactgactacaagatcggtgcgacatggcgcgagtgccactaaggagacccttatgtccatcactatcaaagtcgcaatcaaccaaaccttcagcatggtcgtcgaggattcgatccttgagcagatcgctgctgagcgcgtgaaggcccgtgaggtttcccctgagaaggtggcaaccctgaccggcgagaagcgctactacatggaagtgttccgtagcgagcgcaccgatgaggaagtccttcgggtcgtcttcaaggactcgctgatcgaatgcgccaaggaggccgctggtgagatgaaccaagaaggcattcgagtgaagggccaccagaccgtggtgaccttccctgagccgaacgcaaagatcgccagcgcactggcccggtcgtgcgactgcaatgcctgctacgagtgcaagatcgccaacggtggccgggatgaatgagtacctcgtgaccctctggggactcaagaaggctgcccgtgcgtaccagagcgactttgttcgtgggcgcattgcgctggtcaatgaggcagcttgccgggggcacatctcgtgcctctcgactgccggtaagaacatgggcttctggtctctcactacgagcggccagcagttcctcgcacaatatggaggtgccctatgagcaaactgaaagtgggcctcgcccttgacatggactacctcatcttcagcgccatgagcgccagcgaagaagaagtggactggggcgaagacgtgtggacgctgaactgcgatcacaagaaagcccgtgacattctgttcggcaccctcaagaccatcaaagcggacatcgctgggcagctcaagcgcaagtacaagctggctcctgaagcctacgagttcgtcgatctgtgcatcctgtcgggcgacgacaactggcgtaaggaggtccttgagacctataaggccaaccgtaagggcaagcgcaagccagtaggctacccgcacttctaccaaggcatcatggatcacttcggtcctgagcgttcgttcaagtggcatggtgtggaaggtgacgacgtgtgtggcattctgatgaccaatccgggtctcgctggttgcgaccgggttatctcggtgagctgcgacaaggacttcaacacggtccccggttacttcttctggttgacccagatggagctggtgaagaacgacgaggcgactgccgacaagttccacatgatccagaccatgatgggcgacgttaccgatggctatggtggcattcccggtgtgggcaaggaaaccgctaaggagttcgttgagaaccctgagttcttctatcaggccaccaaggtgatgaagtccggtcctcgcaagggtgaggaagtgtcctactggacctcctgcaagagcggtgacgagcagttcgatctgttccaaggtcctgacctctgggcctgcatggcgtccctcgcagcgaagcaggggatgtctgaggaagacctcatcgtccaagctcaggttgcccgtatctgccgcgcaagcgacttcgatatggacaccatgaagccgatcctgtggcgtccacacgattcgtccctgcgccgctctgctgcctaaaaaccctcactatggccataggggaccgttaggttatctctgtggccttttcgtttaatggagggccaatgctcaaagttatccaacatcacatccaaaaccctgatgacattcctgacatcgctccagccgctgctgagtatctcgctgtacgcctgaacgcctcgtacctgattgccactggcatcgtggatgacctgcgcaaacaaggctactccgagggctacattgcgggcttccttgacggtgctaacgctgctgtcgagatcaccgagctgatgcaggaggctcagttacagaaggaggaatgaccatgtgcttcaaatccaaggtcaagaccccaaagaccaatcctgattccctgaaggcacccgagccggttctcattgaggaacccaagggtgtggacttcggggcctcggaagatgaccaatcgaccgagactgggaccgactctctgaaggtcaagaaggactccaccagcgacaagggtgacgggtctacaaccgccactgccaaggataccggcatgggcaagaccatctctgcgcctgtcaagcgggcaatgaagaaggtcaccaagtgataacccaatggcgtcaatgcggggaccgagcggtctttcgtgagcgcttgagggagatcattgagcagttccctgagatgacatggacccgttccttttatgaggcccatgcggaaatctgtgcggccactgagtcactcgatgagtgggtcgagctggtcgtgagagatgcctctgggaagctcgtggggttcgctgtagcgacggacgacgatgacagtcatgtaggtgcccttctgggcgtccagtggcgcatggtctttccagaggccccagcgggcacctgcatgaagctccaacgtggtctcattaagctggcccgtgaatgcaactacaaggtcatggcgtatacccaccgagtgggcgaaggacgctatgagatcaactacacgaaactgaaggagaaacccaatgggcaagaagatcaagaaggccgttaagtcggtcaccaagagcgtctcgaaggtcgctggcgtggcctctggtggcctgctgggtggcagcgaagacaagccgaaggaagtggtccaacaggccgctccagtggaagctcctgcacctgtagcgaacgctgctgctgtggtcgaagcgccgaaggattccagtgatggtgaggacgattccgataccgaagctgcgaagaaggctgctcgtgccaagggcaagcgtggtctgtcggtagctcgctctgccggtactggcatcaacatctgacaaggaggtgaccagtggccgagaccaaacgagaaggtctcgctgaggaaggcgcgaaagccgtttacgaacgactgaagaacgaccgagtaccttacgagacccgtgctgaaaactgcgccaaggtcaccatcccttccctgttccccaaagactccgacaacagctctactgactacacgactccgtggcaggcagtgggcgctcggggtctcaacaacctgtccgcaaaggtgatgctcgctctgttcccactgcaaagttggatgaagctgaaggtctccgagtggcaggcaaagcagctcgttagcgacccctcgcaactggctgtggtggaacaaggtctgggcatggtggagcgcatcctgatgtcctacatggaagccaacagctaccgagtgacgctctttgagttgatccgtcagttggcccttgcaggcaccgctctgatctacctaccaccacctgacgcatcgtccaattcgtataacccgatgaagctctacacgctccacaaccatgtggtccagcgtgatgccttcgggaacgtcttgcagatcgtgacgctcgacaaggtggcctatgcggcactcccagaggacgttcgcaacagcctctctggtggccaagagtacaagcccgagcaggagctggaggtctatacccacatttacatcgacgacgagtctggtgacttcctgagctatcaggagatcgaaggcgttgaggtcgatggcagtgatggtcagtaccctcaagatgccctgccgtggatcgctgtgcgctggaccaagcgagatggcgagcactacggacgttcacacgttgaggaatacctcggcgacctgaactctctggagtcactcaatgaggccatgattaagttcgccatgattagctcgaaggtcgtcggccttgtgaaccccaacgggatcactcaggttcgtcgtctggtcaaggctcagactggtgacttcgtggctggccgtaaggcagacattgagttcctgcaactggagaagaccgctgacttcactgtggccaagtccgttgctgatgccattgaggcacgcctgagctacgtcttcatgctgaactctgccgttcaacggtcgggtgagcgtgtgaccgctgaggaaatccgctacgtcgccagtgaactggaggacacccttgggggcgtctattcgattctctcgcaggagctgcaactgccaatcgtgcgagtgctgctcaaccaactgcaagcgacccagcagattccgaacctgcctcaagaagctgtcgagccgaccgtaacgactggtgctgaagcactgggccgtggtcaggacctcgataagctgacccagttcctgaacgctgtggcaaccgtgtcgcagttgaatggtgaccctgacctcaacgtgaacaacatcaagctccgactggccaacgccatcgggattgacacggcaggtctgctgctcaccgaggccgagaaggctcaagcgcaatcccaagagatgctcaagcagggtggcctcaacgctgccgctggtattggctctggggtcgctgctcaggctaccgcaagtcccgaagcaatggagtccgctatggacaccgctggggttcaaccggggccaatcgccactcaggtttaaaaccctcactatggctgcatggagacttctctgtgcggccttctttctgataactcaaggagacctcaatgtccgacatttatgccgagttcggcgtcaacggggcagtcatgtccagcaacaacatcaccgagcacgagcagaacatgctggctctgccgacctctgtccgtgatggcgatgagtccatcgagaccatcgacccagagactgaagtcgagctgggcaccgagcaggatcaggagaccgatgtcgaggtcactgacaacgaagctggcgatggtgagaacgatgctgctgaagaaggcagcgaaaccgagttcaccccactgggcgagcctgatgctgagctggtcgaatccagccgtcagatcgacgagtacgccgaaggcttcagccagatgcgcgagcaggccatcaaggctggtctcagtgccgaagtggcggaccagatcgaagcagaatacgagcgtgacaaccagctctccgaggcgtccctgaaggcgctcgaagcggtgggctacagtcgcggtttcgttcgctccttcatcaacggtcaggaagctctggcgaacacctacgtggcccagattcaggcttacgctggtggtcctgagaagttccaagcgatcctgtcgcacctcaatgcgacctctaaggacgccgtggcttctctcgaaaaggccatcgagtcgcaagacctgcacgccatcaagaccatcatcaacttgggcatggcgagccacaccaagaagttcggtaagacccctcaacgttcggtcaccaagcgtgccccagcgtccccagcggctgcccgtaagagcaccgtcgagggcttcgcttcgcaacgcgagatgatcgctgcgatgtccgataagcgttaccaagatgacgcttcctaccgtgctcaagtcgaggcccgagtgggtgcttcgagctggtaaggcactgatttaaaaaccctcactatggctgcatgagagttctttgggatgacccaaggactccgtgtgcctatcaattctgcaaaggagaactacacatggcaaacgcaactggcggtcaacaaatcggtgccaaccaaggcaagggccaatcggctgctgacaaactggctctgttcctgaaagtcttcggtggcgaagttctgaccgcattcgtgcgtcgttccgtcactatggacaaacacatggtccgtaccatccagaatggtaagtcggccagcttcccggtcatgggtcgcaccaagggctactacctcgctccgggtgagaacctcgacgacaaacgtaaggacatcaagcattccgagaaggtcattcagatcgacggcctgctgacttccgacgttctgatctacgacatcgaagatgccatgaaccactacgacgttcgtgccgagtacagcgcccaactgggtgaagctctggccatcgccgctgacggtgctgttctggctgaaatggccaagctgtgcaacctgcctgctgcgtcgaacgaaaacattgccggtctgggccaagccgttgttctgaacatcggtgctgctgctgatctggtcgatgtcgaagctcgtggtaaagcgatcctgaagggcctgactctggctcgtgctcgcctgaccaagaactacgtccctgctggtgaccgtcgcttctactgcgccccagaagactacagcgcgatcctgtccgctctgatgccgaacgctgcgaactacgctgcgctgatcgacccagaaaccggcaacatccgcaacgtcatgggcttcgaggttatcgaagttcctcacctgaccgtgggtggcgctggcgacaacaacccagccgatggcgtggctccgaccaaccagaagcacatcttcccggctaccgccactggcgatgaccgtgttgcccagaacaacgtggtcggcctgttcaaccaccgttcggctgtcggcaccgtcaagctgaaagacatggctctggagcgcgctcgtcgccctgagttccaagctgaccagatcatcggcaagtacgcgatgggtcacggcggtctgcgtcctgaagctgctggtgcgctggtcttcaccccagccgcctaacggcaacccaaaccccttgaggcccttacggctttgaggggttttttcattaggaggatcaacatgcgctcttacgaagcaacactcgaaacagatgacgaactcgcagccatcaacgacatgctcgcagcaatcggtgagtcccctgtgagttcccttgagggggaccctaacgctgacgtggcgaacgctcgccgcatcctcaaccaagtcaaccgcgaagttcaatcgcgtggctggacgttcaacattgaggaaggcgcagtgctctccccggactccttcagtggactcattgagtacctctcggactaccttcggatcaccacctcgggtggcaccgtttacgtcaaccgtggcggttacgtctatgaccgctcgaccaagaccgacgtttacaccaacgacatcacggtcgatctgatccgcttcaagaccttctctgagatgcctgagtgcttccgctcgtacatcgtggcgaaggcttctcgacgattcaacatccgcttcttcggcgctggtgagatcgaagggtctctgcaagagcaggagtcggaagcgtggcagcagtgccaagagtacgaactggactacggcggtttcaacatgatcgacggtgactcttacgtcggtggcatcgcatctcgataaggagggcctatgggactcgtttcgcaatccgtcaagaacctcaaaggaggtatctcgcaacaaccagacatccttcggttctccaaccaaggcgctctgcaaatcaacgggtggtcctcggagactcaaggacttcagaagcgaccaccaaccaccttcaccaagcgactccagaacaagggtttcctcggcaccaagccgctggttcacctcatcaaccgggacgcccaagagcaatactttgtgggcttctctgggaccggtctggcagtctgggacctgaagggaaacaactacaccgtgcgtggctacaacggttacgccaactgtgccaaccctcggactgacctgcgcctcatcactgtggccgactacaccttcgtggtgaaccggaacaccgtgtgccagatgggatcgaccctgaccaacccttcgtacccacggctggacggtcgagcgatcatcaacgtgcgtggtggtcagtacggtcgaaccctgtcgatcacaatcaacggtgacggcactgggtccagtcctcaagcgtccattaagatgcccaacgggtctgccgagaaggtgcccgctggtgacccatacgctggcatgaaccaagtggacatgacagatgcctcatggatcgccgctgagctggcccgtcaactgacggtggctctgggaggctctgggtggtctttccaagcgggcaccgggtggattctcatcaatgcccctgccaacgacaacatccgccagatcgcaaccaaggacggctacgctgacaccctgctcagtgggttcatctatcaggtccagaccttcacgaagctccctgcgaacgccccaccgggttacctcgtggagatcactggtgagtctgcccgttcgggtgacaactactgggtccaatatgacgcctctgggaaggtctggaaggagacagcgaagcccaagatcatcgcagggttcaacaacgcaacgctcccacacgcgctcgtgagggccgctgacgggcagttcgactggactcccctgacgtgggatggacgcaacgctggtgacgatgacacgaacccaatgccgtccttcgtaggctctgcgatcaacgacgtgttcttcttcaggaaccgcttgggtttcctctcgggtgagaacgtcatcatgtctcgcacctcgaagtatttcaatttcttcccgagcagcgtggcgaccctgagcgatgacgacccaatcgacgtggctatctcgcacaaccgtatctcgatcctgaagtacgctgtgccgttctctgagcagctcctgctgtggtccgaccaagctcagttcgttctatcgagcaacggcatcctgtcgagcaagaccatcgagctggacctgaccactgagttcgacgtgagtgatggtgcccgtccctatgggattggtcgcggggtttacttcgcagctccacgggcctccttcacgtccctcaaacggtactacgcgattcaggatgtctctgacgtgaagtccgctgaggatgtctctgcgcacgttccgagctacatcacgaacaccgtccacgcgatccacgggtctggtactgaaaactttgtgagcatcctttcggacggctcgccaaacaaggtcttcatctacaagttcctgtacctcgacgagattctccagcagcagtccttcagtcactgggagttcggtgatgcggccacaacccgtgtcctcgcagcctcgtgcattggctcctactgctacctgatgatcgaccgcccagagggcctgtgccttgagcgtatggagttcacgcaacacaccatcgactattccatcgagccttaccggacctacatggacatgaagaagaccatcgtcctcggtgcctacaacatcgacacgaacctgacttcgttcgacgttcggactgcctatggtggaacgccgggtcctgagtccacgttctacaccatcgaccagcaaggggttctcatcgaacacgaggcgcgggactgggcgaccaatccgtacatctcgttcgtgggcaaccgggctggtgagcagatggtgatcggcaagcagtacatcttccagtacgagttcagcaagttcctcatcaagcagaccgctgacgatgggtccacctcaaccgaggacattggacgcttgcagcttcgtcgtgcgtggctgaactacgaggaatctggtgccttcgagatcaacgtcaacaatggctccagcgagttcgtctacgtgatgactggtggtcgcctcgggattcaacgagtcctcggtgagttgtccgtgggtactggtcagttcaagttccctgtgaccggcaatgccgtcaaccaacgagtcaccatcaccagctccaacccgaacccactcaacgtgatcggatgcggctgggaaggtaactacatccgccgttcttccggcatctaacagtgaccaagtgggggcctcaaaaaccctcactatggcaccctatgagggtttctttatgatcttgacacaagcaaccaagcgtgaccttgaggaagcagcaggcaatctttcgttcgctgatcttcaagaattccattcccacactcgtgggcgcgatccatccgagacacttcctgcctgccttgacgagaccacgatggtcatcaaggtgggcgctttggttctggccgttggtggctccaagaattgcctgtggttcgtgacgaccaatgtggtccagtcgctgaccaagggacaacggatgcgcttctacaagctcctgcatgggcacctcaagggtctccgtgacagtgggcaccaatacctgaccaacttcgtgtcggtcgataactgggaccatatccgccttctcaactcactcggggctgtcttcgctaaggagcacaccatgagtccagccggatgtcggttccgtcaattctggctataggaggtgagctatgtgcgaaccagtatccatcggcatggccgctgtcgccctcgtgggtggcactatggctgcgcacgataagtcgaaggctgagggtgccgctgaggacgcccaacgtcgatctgcccgtgagcaggtcaagcagatgaacatggccaacgccaacctgaacctcaacgctcaggacaaggcagacgaggcccgtaagcagctcgctgaggtcaacatgcaggccctgcgaaaccaagggaccatccgcaccgccatcggtgagtcgggtctctcagggaactccatgaggcgcattgcgacctccgtcgagaacgaagcgagccagcagcgcatgtccatcactgacaactaccaccgcgactaccagtcgatctttgcgaaccagattgccaacaccgagaacaccaagagcgccctcaagggtcaagcgcaggtcatcaagacctcgggcctgtcgaacgctttgggcatcatctcggcgggtgccaatgggtacgtccaagggtcgaacctttcgagtgccatgaagggtagctcggcaggcggttccaacggcacaccagcaggaggtaagacctaatggcaaacgatatttccagagcggtagatcagtcccgcttcggtggcactgagcggctccacgggtccactgcgaccactcagttccaagcatccatccaacgggcacctgtgggttccacgggtctcgctgaggccatgcagcagttcgttaagtcgggcagtgcagccttcgggacgtacaccgagcagcgccaaaagacagccgatgagaggtccaatgagatcatccgaaagctgacccctgagcagcgccgtgaggcaatcgccaacggcaccttgctgtatcaggatgacccgtatgcgatgaacatgctgcgtcagaagtcgggtcgctctgcggcatacgatgtcgaggatgaaatccagaccaagctcaacaatggtgagttcgatgggaaggaccgtaagtacctcgaagaataccgccaacaacgcttggcccagtctgcgaagtcatatgcggaatctgctggcatcgacgagaacgaccctgagtaccaagcggggttcaactcggacatcgttcagcggaacgcgggtatctatgacctgcacgctcgtcgtcgctctgcgtggtttcagtctcaacaggctgtgaacacccgtggcgatctggctccgttgctggacgaccccaatgtgatgcactcgccttcgggcggtgaggtcatctcgggctacttcaataacggcttgcagaatggttccttccccagcgacaagcaggccattgattccctctcgatgctcgttaaggacgtgcagcagaaggacggtggcaccaacctgcttcgctccctgcgagaccagaccatcaacgttctgggcggtcccaagaaggtctctgacctgatcgacccggacatctacgagaacgccatcgcgcaatccgaggcgaacgagtacaagcgctatcagagccgcacccgtgagtttgagctgggcatcactacggccatcaatcaggagaaccctgagaccggctggcggatgctccaagacctgcgggcgaagaatggctggctccaagggtcggacaacatgacccctcagaagcagaagttgattgacgctgagcagcaaatgatcggcatggttcgccagcaatcccaagcgaccgccaaggagacccaaaaggccatccaaggggacgctcgtgttggatacctgaagcagcagtatgaggctcgaatcagcggccagaacgtgtctgtcgatcccaagttccaaccggacatcggtgcgggcgagtggaaaggcgtggacgcaatgaccgctgccaacgagatcatggccgacatcaccaagtcgaatctccctgacaacgtgaaggacgccaagcgtgctgcatacctgcgtgctgactatcagggcggtccattccagacctactaccaagcgctcatcactgacgcccagcgggaatggaacaactcggtgcgctctggcgagccgggtgacatgactcgaatcactgagctgcaacgtgcctatgcggctgacccagcgaccatcggttcggtctacccagagcaggctgacttcctcgaaaagatgaaggacatggctgactcaggggctgacccgagcgtgttgattgccgctgagaaggccaccaagaacatgagcatcgacgagcgcaagttccgtgaccaagcgtgggcagacctgaagaacgattccagcgccaaggacctgacctctctaccgggtccccttgagcggatcgctcggactctctacgacggttacaacgagcgcactggcaacgccaagcaggcccaacagaaggtctctgagtggctccagaagaacaccgttgcgttcaccgaagatcaaggagggacattctccagtccagaccaaggaacgctccgtggccgtctctcgaagaaagcccttatggctgacccagcagacgtgaactcgtggcagggcggtcagagcatcgtcgaggacaccttgaagggcctcgctgagaaccctcaatgggccgacaccgggatgaccgtggaaggcaccgactctggggacatcgttatcagctcgctcaacggcaagcgggtacgcattacccagcagcagatgcaattgatctacaaggctcgccaagcagcagcggctgagcagaagttcaacgagaagaaggaatcggtgaagaccggccagcttctctacaacgacgtaatccgagggggccgtggccctctctaacaggaggtctacatgaaccgcaaagacgaatacgccaagctggtagcagaaggcaccccatacgacgacgcaattcgtcaggcagcagatgccaatggggtcccctacgagtacctgcacaagaagattttcatcgagtccagcttcaaccctgacgccaagtcaccaaccggacctctgggtctggggcagttcaccaaggcgaccggcaaggcttacggtctgatgaccgatgaggatcgtctggacccaatcaagtccatcaacgcttccgctcagtacacccgtgacctcatgggcacctacaagggcgacatgctgaaggtggcattggcctacaaccaaggcaatggtcgtctgggtgctccccagttggccgcgctggatcgtggggacttctccaagatcagccacgaaggtgcccagtacatggccaacctgctggacgtggcgggcgactctccgaaccgtaagtggttcgatgggaatccacaagccccaaagctcaactctgacttcgagcaaaacaccaacggggtcagacaccagccaaagggtgtgccggaacttcccgagtcgcagggcttcaaccttgccctcggggatgctcctaaagtccaaccaacgttccgcgagatggagatcgaccagaacggtccagagaagggcgcatgggacaacacatgggatgccgttaagtcgtccctattgaccagcgtcccggctcagatcgctcggaacataaccgtcgaggaccatgacccgttggactgggtgaagcccggtgacacctcgaactggaacgatcaggacttcgagaacatccgcaaggaagggatcgacccgcaatacttcggcttcatcttcgactacaccaagggcagccgtgacaagctcccagaggcaatcgccttggcgaaggaaaacgctgactatgatcgccggatcggcaaggctggctgggctggtcaactgaccgctggcgtggctggtgctgctctggacccactgacctacgttcctgtgcccggtggtgctggtgcctcattcgctgcccgtgtgggtaagcaggctgccttcagttcggccatgtcggtcggctctgaggctctgcgtgagcaggccactggtatcgaaggacactatgcggctgctgctgtaggtggtgccgtgatcggtggtgcggctgctgctgctctggacaagttcattgccaaggctgctgtctctggtcgtaccgatatggccgatgccgacgtggaagctgtgctggctcgccacggcgaagctggcctacctaaccgtgacgttgagttgcctgaaggtatggcaccagtccagcgcaagccggaagatggtgagatggacgatgactatctggagaagattctgggtctccacggtgagcgcagccacaagcaggaaggcttcaagacaatggccgacgattccgttgagtccatccttgcgcgacacgctgagtcgtctgagccaaacgagttctatggcccgaccagtcgcctgcaagcccgtgaggctgctcgccaagctggtgtagatgatccaacccgtatgccgatcaactccgatgacgcccttgaggacttcaatggggtgctctatgcggacaaccccggcgagcgtggttcggttcgtctgcgggatggctcgatcctgtctggtagcaacccgctcaatccgaagaccaacaagttggccgctgagatcggtcctgaccgttccgctaaagggttctcccttggggcgatcactgagatcggctacaagctgaatcgctctgaggaccctgacgtgctggacatcggctcgaaactgttccgttccacggtgcagactgagagtggctccaatggacgctttgcggctaccgcttcggacatcattgagcgccttcgtggtgaggacaacctgtcttatgggaagctcaacgacctcactgagagcctcctgaagaacgacccgaagtatgccggtatggatggttcgaggctggccctgatggagcgagcgtatcgtcgcgtggcggaagctatcgaggactcaacgaacgccaagaaggccatgctgagcaagcaggagaaggagctgatggaccacatcaacgagcacttcacccgcaagcaggacgtgttggaaaaccctgcccagttcggcaatgctcaggcgaccgctgtgctggaccagagccgacacgctggccactatgtgcctaacgtctatgacgatgctgcccgtgcgctgtacctgaagaagttcggtggtgctgatggtctccagcaggcaatcaagtcgagctggctggcgtcctacgcttcccgcgctgctgtcaaggctcgggtggacaagttcatcaaggaagcaatcgagaaggaaggcaaggtggcaacgcctgagctgattgcccagcgtgtcgagcgctacgcccatgacaaggcatacggcatctcacacactcaggacttcaaccgttcggcactgatcgacgatggtcttgattcgctggtgggcgctgagaacaacaacttcctcgaagctcgtaacctgttcgactcggacgtttcggtgccactgagcgatggttcgtcgttctcggtcaatgacctgcgcatgtatgacttcaccaagctgatgccatcctatgaccgccgtatcaacggtgacgtgggtatcatggctgcgactggtgagggcaccgatgcgctcaaggctcgtgtcctgaagatcaagaccaccaagggcaacagctctgacgtggaggcccttgagtctgccgttaagctactcactggtcgcgctcgtcgtgacccagatgatgcctttgggactgctctgcgatccctcaacgacctgtccttcttcaccaagaacgcctacatgggcgtgcagaacttcaccgagatcgccgggatggtgaccaatgggcatcttcggatgctgatgcacggtgtgccttacctgcgtgagatgactacttggggaaccaagatcaaaccagagcagctcaaggagatgcacaacctgatcttcgggcgtgaactggatgacaccatccggcctcgtcgggctgacatcgtggaccgtctgcggactcaaggctcgaacaacttcgttgcccagaccgtaggctctgccaagttcgccactcaggaactggccgctcgcagtccgttcaccaagctgctcaccgagacttccaactacatcgctgacgctggccgtcaaggtgctctgatggacatgatccgagctgctcatggggacactccgagaatcctcactgacaaggagctgcatcgcctgtcgatcaccaagcaacagttcggtgacatcaagcaagcgatcaaggagcacatcgtccctgacggtgatggcttcaagatcaaggacccggctgctctgcgcagtgacccacggacaatggatatgtggcggatcggtgacaagatcgccgacgagtcaatcctgcgtccacacaagctgtcctctcaggactcccgtgctctgggtgctggctggcatatggcgctccagttcaagaagttcgtcttccggtccctcaacggtcgcctcatgcgtggcatctacgactccaccaagaatggccgaggcatcgacttcgctattcaaggggtcgtcgcaacgggcctcgcaacgggcttcttcgtggcgcaacgctacgtgcaggctcagggtatgccgccagagcaacgcaaggacttcctcaagaactccttcacaccagagatgctgggctgggcagcgatgtcccgtaacaacatcctcggtgctccaatcggcgtggccaacttcgtgctcgctccactgggttacgacccggctgctgctgtgcgtacctcggtcctcccaagaggccctgagttcgtcgctaaggatcgtccagtacgttactcgcctctccgttcggatggcgttcagcgtccactgagcggccttctggagcaggttccgggtgccggtatcctcggttcggtctaccaagtaggtgcgaactctgagggtctctggaaggacactcgccgctcccaagagctgggctatatgaccggcatttacaatggactgcgtggcctcgtgccaaacgatccagtctcgcaacgtgctcttagcgccatgatgcaggaagcaggtatggaataccgcacccgctaaaacccctcactatggcaccctcaaaggctcacttcggtgggccatttttttaaaggagacgatatggctactacaccaaagacggtgcggacctacgctctcgacggcaccaagaaagacttcacgatccccttcgagtatctcgctcggaagttcgttgtggtcaccttgatcggtgcaactcgacgtgagctgatcctgaacaccgagtaccgcttcaccaccaacacgaccatcaccacgaccaaggcatggggaccggctgacaacttcgacctgatcgagattcgccgactgacctctgcaactgagcgtctggtggacttcgctgatggttcgatccttcgggcctacgacctgaacatctcgcaggttcaatctctgcacatcgctgaggaagcccgtgacctgaccgctgacacaatcggcgtgaacaacgatggtgacctcgacgcccgtgcccgtaagatcgtcaacctcgccgatggcgtgaacgatggtgatgccgtaaacatgcgtcaacagcggcaatgggcaggctctgcgttgaactctgcgaacgccagtgctgcctctgcgcaagcctctgaggcgtcccgtcaggcttccttggcgcaggcccaagcgagcgctgcaagtgctggtcaatcgagcacctatgcgaccaactctcagaactctgcaagcaactctcagacttcccgtctggcctctgaggctgcccgtgacgcttccatcaccgcccgtgatttgtcccaagcgtgggcctcgaaggctgaggatcaggtcgttgcatctggtctctattcgtcctaccactacagccgtaagtcggcagcaagtgcatcggcgagtctgacctctgcgaacaactctgcgaactctgcgagtttctctacgaccgaggccaaccgggcaaccactcaggccgaccgtgcgaagaccgaggctgacaagctgggcaacatgaacgcgctcggtggggcgatccgtgaagtaaacacgactggcaagaaggtagagatcaacaccggctgggagtggaattctgacgtaattgcggtagacgggttccgctcaaggagttcgtcctccatcgacttcaatgcccagctcaacgggagacttggcgcttcattcactgggagcctttcagttggaggtactaccagcctacagaacaccactgtagccggtctaacagtgaactctggtgcccagttcaagaatggtaacgtgcaggtatttgccccgaactcatcgtctaactcccatgtctggttctacggccctgacggtacttcccgaggaattctctatgctggcacagacaaagcggtaagggtgcaagcaggggaggtagtgtgcgcgaccttctctccagatggagggaccacactaaacaacatatctgctggtaatgttacggcccgtgctactgcatatactcaaggtgggattgagaataacgggcgtgtcgcgtcctaccgcaatggtgtgggcgcaaatgcttccatgtatgccaactgccacttcatggctcagaccgacgatggcactgccccagcctatgggttccaccgtggtggctcgtatgctctggctctttggctgaacggaaatcagttgcacatgatggactcaagtggcactaaccgagaaatcctgaacaacacgaacttaggctcttggatggtcagcgtaggggagcagggtgtcggctcgtatgcgttctgccgttccggcgtgactgctacctacggcgttgacgttgctggtggaaacctgacctacggctcgactggcgcgaacggtggctctgtccccggaacttggcgttcccgtggctgggctggaggtggtaaccataccctgttccagcgtatcgcttaacaaccaataggcccttcggggcctctctaaggagggcacatggaatttcctatcaagctcgaaacaggggtgaccctgactgccgcaaaggaccccgtatggggcgaccgtgatggcacgttcatcaactgcgtggtgactcttgaaggcggtcctttcgaggaacctactgaagttccgttcaccgcaacaccgacagactacatggcccatggccgcgacctgttcgattactttaaggactctgcgggaccgtgggttcgcccagatgtcaccatcgaagacttacaagctgacttcgacaaaatctggcccgacgtgatgttgggtctggccgatcaggcaaccatcgacctcgctaagaatctgcgcgttcagatcaaggcgatgagctgatggctggccttgagatcgacttcaccaacggggtggttcgcgctgcccctatcgccgctggagctggtgctgaagtagcaagccaagtggcaggcatgagcctgagcgattggttctacgccaccatcatcctctacaccatcgtgcaaacgttcgtgctggtcttcaagaccgtcatggacgagaagcgcaagaacaaaggagacccaccatgagtgacaacgttctggaaaagctgctggaggcaatcgacaccgagaccggtcgtgccctcctgagcgaccttcgtgatgacgaccgtcgttcccctcaactgtacaacgccatcggcaagtaccttgagcgtcacaagttcaccatcgccaagctgaagcccgatgagtcccttctgggcgatctggccgctgccctcaacgagttccctgagatgggtgaggatgagctgtacggtgacggagtgcgccactaatgggcctcaaggagatcgcactggcagtcgttctggctgctggtgccctcggtctggcctacacaaaaggtcacgccgatgcgaccgacacactgaccatcaaacaccaagcggaactactggccgctaacagacaactggaggttgaacgtgaacaagctcaacaaaccatcgcggccatctcaaaggaatggcaaggctatctcggttcgagcaaggcatctgctgatcgcgttgtggctgatcttcgcagtcgcaatatcgggctgtcagtccaactcgcagatgcgaccgtccggtgcgtcacaagcgacggtagacccctccctgatggtcgagccgaactacgaagcgactttgcttcagctcttatcgagcaagcccaacgagcagacgcccaagtgaagggccttcagaaaaccgtaagagcactgcaaggaggtaagtaatgtcgaaaccccgcaatggggccgacgatctggagctgattaaaaggtcattcgtggcctttctttttgtcctgtggagggcactgaacctacccaaaccgactaaatgccagatcgacatggccaagaaactgagcgccggtgacgagcgccgttttattcttcaagcattccgaggtatcgggaagtccttcatcacctgcgccttcgtggtgtggaagctgtggaacaacccagacctcaaatttatgatcgtgtccgcttccaaggaacgggcagacgccaacagcgtgttcatcaagcgcatcatcgaccttctcccattccttcacgagctgaagccggggccgggtcaacgtgacagctctctcgccttcgacgtgggtcctgccaaacccgaccactcaccctctgtgaagtctgtaggtatcaccggtcagttgactggtagccgtgctgacatcctcattgcggacgacgttgaggttcccaacaactctgccactcagaccgcccgagatcacctcggagagctggtgaaggagttcgatgcgatcctgaagccgggtggtacgatcatctatctgggcacccctcagaccgagatgaccctctaccgcgagctggaaggccgtggatacgtcacaacgatctggcctgcgagataccctaaagaccaagctgactgggactcctacgggccacggctggctcctatgctggctgctgagctacaggcagatggttccctgttctgggcaccgactgacgaggttcgcttcgatgacaaggacctgcgtgagcgggaactgtcctacggcaagggtggcttcgcacttcagttcatgctcaacccgaacctctccgacatggagaagtaccctctcaagctgcgtgacttcatcgtagggacgtttgctcaggacaaggggccaaccacccttatctggatgccaaacgctgccaacgagtgcaagggcgttcctgtggtgggtctgaagggcgaccgcttccaccgctacgaatccgttggccaagccactgcgagctacgctcagaaaatccttgtgatcgacccctcgggccgtggtaaggatgagactggctacgctgtgctgtaccaactcaacggctacatcttcctgatggacgctggtggtttccgtggtggctacgaggacactgttctccaagctctggccaacatcgccaagattcacaaggtcaatgagatcgtcgttgagggcaacttcggtgatggtatgtacatcaagctgctggcccctgtggtcaccgctacgttcccttgtgcgatcactgaggttaagtccaagggtcagaaggaactgcgcatctgcgacgttctggagcctgtactgggcagccacaagctggtcatccaagagagcctcattgagaaggactaccggacagctctcaacgctgacggcaccactgacacgtcctacagcctcctgtaccagctcactcggatcacccgtgagagagggtcactggctcacgatgaccgtctcgatgccctcgccattggcgttcagttcttcactgaggcactggagcgggactcgaaggtaggtgagtcggagatgctgcaagagttccttgagagccacatggaggacgccctgatgggtcacgaccggttgctggagatgtcgatcagcgaaggtgtgtcgatccagtacgaggacgatggctcaatgaccaattacatgggctggtaaggactctgcaagatcgcagcaagatcgacgaagatttaaaaaccctcactatggcccagagagggggtttatctcatagataaacttagagactctgcacgatccctacaaggtaggttcttcgtgcagtgcttctccctcgaccaattcaacagtgattatcaacaaaggaggtaaggccatgaccgtggagagagcgactgtgctgctcgtcttaaagcgccttgccctctctcggtccacctacaagctcatcggccttctgctcgtcaccttcggggtagcaagcggtagcgatgttatgagctgggtctccaccatcgtgtgtgtggcctctggcggatgcggtgactgacgctcaatttcggcagggttaacaccctacctcattgagccataagagcaaggcttaacgtttccctaactggtctccataggatgccctttagggtatcgttaggtctacccgatagatggcacttgcatgaaccgttgggttaccataggatgacctttaagaatctgacagaaaaatctgaaaggtcacctctcaaggacaacagccgagagttcccccgtaggggcctctcaaggatgatccataggatgacctccccggtgacctctgagtgagatcgcctcggttccctcaagggcatctcatggggatcattatgtgccagctcagag

SEQ ID NO: 5 - DNA, 227329 bp, unidentified
  source 1..227329: mol_type = genomic DNA
acgatgatgacgatgatgacgatgatgacgatgatgacgatgatgacgatgatgacgatgatgacgatgatgacgatgatgacgatgatgacgatgatgacgatgatgacgatgatgacgatgatgattcggatgatgacgacgatgaggaagacgacgcgttcgccaagaagtcgaagggcaagaagtcgaagaagtcttcggatgacgatgatgatgacgatgatgatgaggacgaggacgaggacgaggacgatgatgaacccaagaagggtaagggtaaaggcaagaagcctgtgaagggtaagggtaagggcaagaagtcttcggacgaagatgatgatgacgaagatgacgatgacgatgacgacgatgacgacgatgacgacgatgacgacgatgacgattcggacgatgacgatgatgacgatgatgatgatgatgatgatgatgatgatgaggacgagaagcccaagaagggtaagggcaagaagcctgtgaagggcaaggaaaagaagcctgccaagaagtccaaggaaaagcccgctaagggcaagaagtcgaagaagtccaagtaacctcggcagtccctgattggcctaaaaacacaggaaaatccttgcctcaaaacgcccaaaagtcggtaggattaggggttttgaggcatcctgggaccatcagatttgggaggacgtgctaccccacgtcctcccttattttcggtattttcgacggaatccagtatggcaaagaaggctgtcaagcctgcaaagaaatcggtaaagaagggagcggccaaggctgcctccaagaagaaggaagccccagctaaactcaaggcttctgcacctgcggtaaaggtttggcgtcctaactacgacgacgttatcacggtcgtggaaaagaagtccaagctgtctagcaacatgcagaatcgtttcgactacgccatgcactcgggactgctctgtcaggacatgctgctgggtggtggctacgtgtatggtgcaatggtaacgaacgtcggtggtgaacagtctgccaagtccaccaactgctctaacttcctcgccaccttgctcgacctgccggaagaagaacagcccggtctgattgtgtctgccgaccccgagggttcgaccgatgcagtctacatgagcaacatgatgaagaatcgaattccggtagaggaaatctttggccagcgcgccaaggacgggtcgtgggctgtacgtcctcgcatccgctactacccggaagagcgcggtgaactactgctcaatgcactggcgatgatcctgcgtcgtctgccggacatggagttgatggatcagcagtggtactacgtgtacgagaacaccaaggagaaccgtaggatcgttggtgatcggtacaacaagagtttcttctccaagcacaacaagttctacgtacaggcaccgaacaacgcaccgcagtgcgtgatcgtgttggatagctgggttagcttggtccctgagaacatggacgatgatgatccggcagcgggcctcgcagcggttgcacgtctgctggccgctaacctgtcgaagatcaagggtaagctgcgtcgtaagaacgcgatcctaatgggtgtgaaccagcttcgtgagaagccgatggcgcagggtgatcctcgctatgaacccggtggtcaggcgctgcgcttccagtcggacattcgtatctggcaaacgccgcgtgctcttagcaccccgcagatcggcctgagtggtgcgagcggtcctgtgcatgaagagacttcgatcactggcgaaggtactgacaagtatcggtacatccacatggttgcgaagaagaacaagctggccgttccgggccatgagtgcttcgctcgcatttgggtggctgacgaagacggtatcgcgcatggcttctgtcccgcgttcgacgtgtggtacttcctcaagatgacgggccagttgtccggcagccagaagaagttctcggtcaaattgaacaagggtcaagagttcaaggccaacatggttgacctcaagaagatgatcctgctcaagggcgccgagcgcaaggaacacttccgtaagatgaagctcaagccgttcgacataaaggcgttctgtctcaagcagatcaagtcgggcaaggctaaggaactcatgtaccagcattccaaggcgggtgccgctgaggaacaggaggacgaggaataatgatgcaacaggctatcgacaaactgcgtggaaggttcgggcagcctgacggtagcctgtccatcacagtgagcactaagcacaagtccgaagcagaagtgctgacgctgaacctcactgtcacgtacctctattcacagatcgggaacactatcgtgctcgaccccatcaacgcgacaagcctaagcgcgttcctgcgccgacagcttgaaccgaagatcatcaaggcattcgccaaggtgagtgagtctaaggcacgattggttcccggctctgacctgaaacacctaaaccgcattcaattgatggagaagtgagcgtgtaccgtagcacgaaaacatggggccatgaacgaggctttagctgtgccttccgacagtggcgtgctcacgacagccattgccgattggttcacgggtacgcccttggcttcaagtttgtcttcgagacagaccagctggacgaacgcaattgggtagtggacttcgggggccttgacgacctcaagcaaatcctcgcggacaacttcgaccacacaaccatcatcgccgaagacgacccggaactggaatggttcagggaagcagaccgccgtggtgtcctgcgccttgtcgtattcccatacgcgggttgcgagcgcttcgccgaaatggtgtacgctgtgaccgaacagtggctaaaggatgcagggttcagtcctcgctgccggttggtatcggtagaagtaagtgagcacggcgcaaactctgcgatctatcatggcagtagtcaaagctaacagccgggtgactgtgcgggagaagctgtaccgtgcagccatcgggcacatggtcaaaagagggtgggccgtccatcgggagtttggtctaaatggtagggcgcggcgaggtggacagggccactaccgcgcggacctattctgcaacaccttgaaaggcaagtacgccgcaatcgagataaagtccagcgtcagcgatctacgtgctgacaagaagctgcacaactattgcggatactgccatcgtctgtggatcgtaaccacggaaacggtgtggaagaaaatgaaggacaagtatccgtttcccgaaggctgtggcgtattggtcctgtcaatgaagacaggattgctgcgctcagttaggcggactaaagagtacgatctaggtgatgacgtatggcgttccattgctatgcgcctgtcctatcgtacagcggaattcagcagacgcaacacggttcgacgccgagtatatctaacagaagcggaagagaaggcgtcgggtacttagtgtattgacgagagtgttatgcactcgctatcggagaaactcatgcaacacaagaagaattcgtttgaggaattggctgcgctcaagggtcacttgaagccgaatgctgagaacgtcattgattcatttaccgggcgctacgccttcctgtctgagtcctaccctgcgcctattgagcatgcaggtacagtgttcccttcggtgctgcacgccttccaagcgagcaagaccaacgatcgggcacgtcacgcaatgatcctcctgattgatgatccccatgaagtcaagaagttctcgtgggaagagaaggtggcatggcagtggattcggaagaagctgcgactgcgactggaaatgcgtcgtcagcaattcccctatggcagcactctggcccagcagttgatcgacacaggcgaagccaagatttatttccacaatcgtttccttgatcggtattggggagtcacccgccgcaagaatggcccgtacaagggagacaaccatgacggcttcattctgatgcaggtgcgcgacgaactgaacttccggtccaagctgcatgacgcctacttcgagtgcatggccaatcccgagaacgccaacctgagtcaagcggctctggcgctgaacgctttcggtgcgctgggtattccgttcgctcacatcttcgacaacaagactgcctttgacaactcggacgtggtcccacgtgcgctggtgttggatgatcgcgtagagttcactatcggtacgtactcgcgccctcctgtcgtcctgaccatgacgcagctggtgtcgggtgcctttagtgagcacctgaaacgtggcctcgcagatggcacactgagcatccaaggcaacaacggccttagcgtagttcctccgccgaccgagaaggaacgagcactgcacgtctccgataccatcatcaagatgctgacggcaatgggagtcacccggtacaatggtgagcctactcagtgccacacgctggaagaattcaacagctgtacgcaactgccgtgttggtacatcgacccgagcgatccgatgcacttccatgttcggtacatgcctacggaccctcagcgtgctatgtgcactgtcgttctggagcgtaaggaaggtaacgcagagtgagcttcgccggagtattcatgggggatattcacgccgacaaactcgcacacctgttcggtgctgaacgatcccttgaattgcagtacaacgagtggtgcaagagtgccgactacgcacttgagcacggcatcaagaattggtatcagatgggcgacgtagcggataagccacgtctctcggaagaggctcgcgtttggctcctgcggttcatgcacaagtatgacggactgctggagcaggattggattctcggtaaccacgacaccgagtacgagggctaccattccatgcagcagtttgaggaaatggctaagatgggcatgttcaagtccatccgattccattgcgtcaagaagcaggtagtggtcggtggtgtccccatcaacttccttcccttccctgagaagaaggcgatgccttatcggaagggaggtgagacactcaaccttgcacaccttgaacgaccgggcgctattcgtgacaacggcacgcgtatggacctcaatcatggcacacccgaagagggtagcgatcactgggtcattggccacctgcacacgcagcagatgatgggtaacagctggttcgtaggcacgccctaccaaactaacttcggtgagtcactgccaaaggggttcggtgtgcttagggcgaagcgattgacttcgggtaaactcaagatcgagcgcgagttcatcgagacgcaaccgggcttcaccctgcacaacctcaaggtggaaaaggtcagcgacttgaagaagatcgcagatgacccgctcaagctctacaaggttgtggtgaagcgtggagtggagttgccttacgacgtaggcgcacgtcacccgaacgtggtcaacaacgtggtgacctacaagacggacaagcaagctgaaaccctgctggctgacactgacactgaaatcaagttcggtatcactgacaatctgcatggtgaattgaagacccgaggtcacaacaaggcgcagcgcaagcgcggcgaagccatcgtatctgaaatccttcccactatcggagtgtagtcatgagcgtcaacaatgaacctgtaaaggttcctgagagcgtgcagtctgcacgattcatcaagagcaaggacgggactttagcccgtgtggtgatacttcctaccgcacccagccacagtgcaatcacgtctgacgaacgtatgatgttggatatgagcgaccacatcgagtatctggaactaatgctcacagccgcaggcgtacccttcaacccttatgggctaccacctgctcccgtaaacaaggaacaaggaaattgaaatgtcactgagtaatcacgcacgacgcgaactggaactggcgggcctactgaacccggagagtgactacggcggtatgcttggcgatgccgtgctccagctgatcgacaccttctctgcgcaaggccacagcggcgcaagtgcagaagttgtaatcgacctgtttagccgggtcgcccgctacgaaatcctgacgcccatcgttgaggataaaccggaggattggcatgacgtgtcagagcccagcggatacccgtgcttccagcaccgtcgcctgagccgactgttcaaggacggcgagggtgtgatgcgcctgcatggtgcagtggtcagcatcgacccctcgggcgaacgcttccacggtcctgctatcgaggtcaagttgccgatcatgtccgacgtcaaggaacgtcacgttgactttgatggcaacgagattccgcaggttgtgtgggagcgtctgaactctgagcaccgcgaactgctggacgttggcgtcgaagagattgatgacctcgacgcgcgcaaccttgtggtggaggaactgattccggtgccgaccacgctgaccggaagcgacgcagcactcgaagcggttcagtacgcccacgatcacgaaaagattctctacacttcggttgacggcctcaagactctgctgctcaacgagaaattccttgctgattggcagcccgcaaagcagtacagcctcatgatcgggcgcggctactgcggtacgtggcatggcactcctgtcgtgaccactggctaccttgacccgaccaagtacaaccatctgatcggtatcgaaggtctgtacttcaccactgctgtatccactgataacgaggaaaactaatggctactccgcgcaagaagaagtcggctgcaccgaaggcaaagaaggtagtgaagcctgccaagcctgccaagaccttgaccccgacggacaagttcatcaacggcatcatcaacggtgacaccccgctgacccatgaccagctggaactgctccagcgtgcagtgctggtggcagatggcgacgaacctgctgcggccgaagtggaaagcaacgcggtgtctatcagcgagtccccgagggtgtggaagtcgtcggatccggtgaagcaggcagagcgcagcatcaccaacctcctgagcgatgatgcagctgattgctgtgaactctcggtgtacagtgtgggcagcctgctgacctacgtggaatcggagttcaatcaactgactggcgctctgagtcatacggaggacatgctctatcctgtgctcaacactgacgtgctgggtattccgactgaattcgctgagacgccggataacgttgcgtccaacaaccgcaccctgatccgactgctgaacaacatccgcaaactgcgcggtgaagtctacagtctcacccatcgtatcagcctgtaaggaacgaacaatggctaacccacgcattcccggtaagctctccggcaaactccccgctgacagcaaggttgtcgtcactggcgtcaagcgtatcgcttcggaaagcactgatcctctgccgccatcctcggtccgctccttgatccagtcgattgacagcgaactgcgcaacctgcacgacaacatcaccgaggtcaacgacacgttctccatcgtgctgactgacgaagcttcggtcaaggatgaagccaagatcgcggatgcttcatcgtccgatcttgtcaacaccctactctccatgcgtgatcgaatcgttgaggcacgcttccgtcttatctcgctggtggagcggtcctctctgtgattcacctgtacgatggcagctatttcgcacatcgtaacttccacgggatgcccaagctgaccaacagcaagggcaaacccgttggcatgctggtcggtgctgcgtctgcgattcacaagctggccgcagacaagaagatgggtccaaccttgttcgcctttgacattggcaagtgcaagtggcgtgcaaagctggtccctacgtacaaagcaaatcgtgtgcacgacccagacattggggtgcagatgaaagtgctgatggacattgttgcagcctatggcatcaagacgtgggcgaaggctggagtggaagcggacgacgtgatcggtacagtgacacgcatggccttagagcaaggcgcacgcgtccgcatccatactggcgacaaggatatgaaccagcttctgaaaggaaccaaggtagacattatccatccagtgtcggggaagatcactactgaggcaacactcaagaaggagtttggtttcggtgctgcacgttttgttgactacctagcgttgatgggagacagcactgacggttaccccggccttcctgactgtggaccgaagacggccaaggcgttgctttctgccggtggatcggttaaggccatgctggctgacccgaagaccgcaggcaagcttgccaagactgtcaaggccaatctggaaacgctggaggctaactacaaggtggcgcgcatccgtcgcaagatcgcgctaccgttcagtgtggacgacttgacacctaccaagatcgacacggaaaaactgctggagatattcgacaaatgggaactgaatgcagcagccaagagggtgaaggaaatcaagaacagaccgaagggtctgttcgggtagagtgggcagaagatcagtcgaaactgccggactggttcattgaccaagcattacctcccggcactatcgacaatcgctgcgtggaagtggatggcaaatcgtatgccatcgctaacatcactgacccgcgtagcctacacgccatcatcgcatacatgaggaactatcaatgagtgaacgtgcacctgtaaagctggattacgtgcgtgatattctgccgtgcatcggcgaggttcggtacgaccgcatccccggcaccaccatcaccgtctgcaccattgacgtgctgcgtgatggcaagtctgttggcttcccggtgactggtcagagcgcatgcgtatgtgacggccagttcaacgcgcagttcggggaggaggctgcgttcaagcaggccaccaacaagatttgggagttggaaggttaccgactggctcatcggatcattgagcagggcgaccatcctgccacttacgaaggttgaaaccgaggctccattccctagcgggatggggcctttttcgtattcggaatcctgtaaataatcagtggcagatgcctccattggagaacccgaagtgagcgacacgaagattaagaagaagtccaagaacaaggatgggaaggtcaagaagaagtccaagtctacggaggttgcagtacccgtaagcgatacggtggacaatcgcagcctcgctgtacgctggcgtccgaaggacattgacgacctcgttggtcagacggagatcatcaacaagttccggggcatgttgaagacaaagaagattccgggcgcgatcctgctggtcggtcccactggctgtggcaagaccactgttagccagatgatcgctcggtacgtcaactgcgaaaccatgaacgcatgtggcaagtgtcagaactgcctgatgccgattgagtcccatcctgactacgagcaggtgaatgcttcggagaagcgtggcatcgacgacgtgcgcgcgatcatccagcgcagcaagaatcgtccgcgcctcggtaaccttcgcatcctgcatctggacgaagtgcaccagcttacgccacaggctgctgaggccctgctggtgccgctggagaagccaccggaacagacgctgtatatcctgagcaccaccgatccgcagatgctcaagcagacgatgcgcaatcgctgtgtgccgatgaacatccagctggtgccgacggcggacgtaatcaagcgcatcaagttcatcgcagggaaggagaacatcaagatcggtgactcggtgatcgagcatctggccaacctgtcccagggttacatgcgtgacagtgtgcagttgctggaagctgtgcagatgcagctggccaacaactcgaagctcagtgacgatgaactcaaggtcatcttgagcaacaatgcacaagccggtggtcaggaaggtctggacgatctagcgatcaaggtactgactgcgtgctacgggctcaaccgtgttggcgtcgccaagtacatgctcgacctgcgtaccgattgggtgccgttcctgtccaagtgcatctggctgaatcagtacatcgtggacgcggaactgaccaagaacatgcgctaccacccgaacgtgtggcataacccactcaacaagcgcttcgcgtctgttatcaagaactcggtcgagggcttcgatcccggcaagggcaaggtgattgaaatgcttgcatcgttgcagcgcaccctgatcgacctccgacagaagtgtatcagcggcggcatcgccagtgtcgagcgtatgatgattacctcccacctgatcggctgggttgtggattccaagaagggataatgagcaaggtcattgaatacgtcggggacgacgctatggagcggctgtgcaaagacatggccgcagacgtgttgcaacacactgatccattcaaacgggcaaccgtgtacgaagatttacgcttgacccgcaagatattcattaagctgcctttgggatggcacgaagtagtgggcttccacgtcatcggtaccactcctgaaactgtgcagccactactcactatggtgaacagatgaacaccgataagagcgccacgaccgaagctttcaccaagcgtaacgccaaccgaaagaaagacaatcaagtagccacagcaaaacgggatcgccgtgatgctcgccgcaagacagtcaagctggcccgcaaggtggagcatcttgaaggggaagtgattcggttgcgctcagaaaagtctgccgcgctgcgcgacgttcaaatgttgggagcagagaacagcacgctggaggtggaggtggaaacgctaaccgccaccatcgccgagcaggccgaagagttggctgaggtgtatgccaagaagcacgacgccgaacgagaagcccgcgagtggatgctggcccgtggctggtggaagcgacaggcagcgctactgacgtgtggtgtgatcggtctgttcatcaccctgatggccctcatcttcaagagtaacaatggctaagaagcagaagctggggtggcgattcggccacctcagcctcaccaatgttgtgtatttcaagaaggcggagttagacctcgggtacgagggaaccaccgtcatcaaaggtctgaacaagaactctcggctcaagcgcaagaccagcaacggcgtaggtaagtcggtgttggttgcatccctcgccaacgtggtgcgcaactcggcaccagcactcagcatcggcaagcgcaacagtggtgccaagaccagcctgctaatcaaaccgaacagtgcgattgagtttgacgttcggtgtaatggcaacgactacggcatcaagaagtaccgagacaagtctgcgtcagtgaagtatcagatcaccgagaacggtaaggatatgaagttccctaccgcaaccaaggccgaagcgcacatcgctgacaccttgttccctatttcggatgatgagttctacagttacgtctatctgcatggcacccgtaccttcccgttgcagatgggcacctccacggatcgtatgcagttcttctctgatatgttccggctggagaagttcgacttggtacgcgcggcatgtaatgcacgacgcaacgagttgaaggacagcgagattcggatcaaggaactacgcaagcagctggctaccttggacgaagaagcgggacgcgtagacattgatatgctgcgtgctagggctgtcaagtatcagggcaagatcaagaagctggagaagaaggtcaagcgcctgcgtagtcgccagcgcatctacacggtctacaccacgcacgcaaaggaatgggagaagctggatcacagcattccgttgaaggaccagctgaaacaggtcagcgccaagatcacgaagctggatgaggctgcaatcgcatggcgcaaatacgaacgccaccaagatgacttgactcgctggaaggccgagtacctcaaagccaccgagaaggcgggtaagctcacgctggaaaagtgcagggagaagatcgaaggggccaagcgagcggaccgggatgcacgtcgagcactggatggactgcgcaagccgacccaacccgaggccgtagccaaggccacgttcaaccctgctgactacgggttggaaggcgacacgttcaagcactggatcgtggcagccgataaggaacgtgcacgctttgaagcactgatcggtctacagaagcagatcaacaagatcggtagcaagggtggcaagtgtttcgtgtgtggctcgaagggagggaaggccactgaccatctgcccgagtacgagaatcaggcgaagcgctggcgcaaggcaacagagcagatcgaagcagcacgggactacgctgagtatcaggaagaggcagcagagtacgagaaggaactgtcggcattcaagaagcagcgcaagaagctgcaagcgatccttgatgacttgcccgacgtgtccaagtacgagaaggccatcaagtatctggaatggctggaagagaaccccaagcccaaatggaagggcgacgttcctgagaagcccagcaccaaggcacgcgacaagttggttgcacagcagtcggtgatccgcaccctgctgcccgttgaagaacagttgagggaagcggcgcagatcgacgttgaggaactccgatcggcggacaaggaatatgagtcggtaagcaagaagctgtctaacacggtggccaagaatgcggagcttgcacctcgcattgagtatcaggagaagctgttacgcgccatcaagcaacttcgggcgcaggtacgcaacatcggggcagacttggaagacctcccgatcctcgacagcctgatcgacatctactccaagaacggccgcaagctggaggtgatgaaacagttcgccctgagcctagagcatcacatgaacgctaacgccccactggtgttcccggagcctatgcgcttcgagttcgtggtgcaggcgaacaactttagcatcaacgtcacccgagggactggcaaggaagcgctgacttctgacgttcggttcctcagtggtgccgagagtaagcagttcaacctatgcctagtgaagtccctgcttccgatgatacctgcctcgcgccgcgccaacatcattgtgctggacgaatgcgaagcgaacctcagcgaggcagcgcgtgacctgtacgtaaacgacttcatcccagcattgcaaaaggtagtgccgcacgtcatcgtcatcactccactagatgacgtatatccatccgcccgagtcttcaccgtggtcaaggatggcaacgaatccaaactcatttcaacgggtatgtcatgaacgaccaaacaccgaacctacacgtcagggtagtggacacgcaagagacgaccttgatcgttccacctgaattcaccactccgggctgctacgacgttactgatcctgcggttggtgccgcagtgcagaagctggtacacatggcagcgcattcctatcagggtgtaaacaacaccgcagctaatcgggctgcgatcaccagtcgcgtcaacgaagtgttcaccaacctgcaagcgcgtggtgtctccttctatcgtggcgaggcgaagccgggcaatcaggtagtgggtttcgttgcccgtgcccatccgatgcgccccagcgaaatcaacatcgttcccctgctacacaagtcgctggacctgcacgataccgatgagaacgaggaacaggaggataccgaagatggtaacgaagagtgagctagagaactccacgggtgagttcagcaaattgatttggggagcgcagctggtatccatttcacacgcaggcaccgaagtgctgtgcgaaatggaaagcggtgaagtgctgtgcatcgtagccgatggcgcacggctagtaatcaacttcccaactgaactgatcctgcctgtacctgtaggcgattgggcgataaacgggaacaccgcaagctgctacgctgaggacaaggagctttacttccaaatctaccccgaaggtgaggagccgttctctaaactctccacccgcgttgccaacatttacttcatgaagaggaagaccgatgcagcagtttaaccacgtcgaagaagcgggatcgtggcccgaggcgtatgacaatgcagtgaaggcagagcgacgcctaccgcactacagcaatcggatcatccatctggatgccagcatggagggcagcttcattctaaccgtcatctatcagcgcatcgaagtgcggatcgctatggcaggtcactccaagaccacccgtgatgacgtggagcgttgggcagaagtggttgccattgccaacgaggttgtaaccgaagtcgtcaaccacctgcacgctaacgggtgccgcctcaagtacaagcgcaagaccatcgccgccctcactgtcaaggatgacctgtcggtcgtcactatctacccggagaagtaacatgcaagaagctggaatcgaaatcccctccatgagtgttgaagaacgcctcgcctccctcacccgtgacttggctgctacccgcactgcactccagcagtccacgcagctgctcggtatgaaagaactgttcctgcaatgcctgacctccgcgctgctcacccaaggcgttcggatcgaggccaacggcaacgtggtcaatcaggcagcggacgaacagcgcgcactggtcactgtgctgacgcagaagctggaagacgtgactgcggccaatgagaactacgttcgcatgatcgaaaccgcccagcagaacgttgaggcacccgctgcggtcctgccgctgaacacggaagctgctgctcctgcatctgctgatggggaatacccggatgactaactggtccccatccatcactcaagcaatcaggattggccgtggtcctaccctcgggcgcggtcctgcggtcaatggtcagcgtgaggcacccaaacgtacatcgtatcccgacgatagcttgggcatgaacaaggtagctcctgttccgcctatcgccaagaagaacaaagtagatgccagcgatccgttgccgcttatcatccagctactgcgcatgcttggttacacgaagatcacttccagtgaacgcatcgccatgcagcgcctgctggatgatccgtcacaccccaagcacctgtcggtcatgcaccagctgattgcagaccctcgcagtatggaactggtccgtaagtattacaccatcatgggtcatatcccgaaagcggtgcgtggcctgttctaatgatcgttggtgtaacaggagggcgggacctaggtgaagaggatagagcctgggtctacaagaagctcgaccgctaccacaagaagtaccagttcactcatcttgtccacggaggggcaagagggttggatacgttagccgatcaatggtgtgagacgaagccgggtgtgcaacctgtgtgctgccgtgccatgtggagtcgtgatggcaacaaggcagccgggccgatcaggaatagggcaatgcgtcctctgatagctcggctcttgtcgtttcccggcggtaacggaaccaaggatatgactgaccactgcgcacatcacggtgtgccaatcacaaggatcaaagcaccatgacaaagtacggtgaaggactgggcagcagctgctcgggcaagggcctgcgctcacccaccaaaggacgcgcccgtggtttcagtcgaaccacgatggctgcactcactgaccccgatcgtcaacccattgaggacactatgaagaagtctgaactcggtaacaccagcagtcaggatcaaaccaacctcccctacgccaaccagccggaaggagacaaccgcatgggtgatcctacgccgccgaagacccgcgaaaagtatttctctgacctcgccagcagcctacagggccatgcgcgttgcctgagctacaacgatgagaacgggccactcaagcatcgcctgcacgaagcatcccatgctctcgacagcgtggccattcgcgtccacaagaagaaggacgggctgctgcttatcaccggacgtggcaagtctaggttcgctactgcccgtgaacgactggccatctggctgctgcgcggcaacacggggatcgaggtatgatcgacagcgaattccaagaccggggtgctccccacctcccgcgtcctaccgacacactgagcaccagcgacccacacaggaacgtctccggcaaagctcaattctggccaaagggagtaaagaagcctgaccccatcgacgatccacgcctgcacgatcccgaatacgcagactacagcatcaagaagggagacgaagtttacgcagcaggctggaccctgacgccgctgtacgtggtggacgtgaactgggccctacgcgcaatagcagtacgcctaggccatacgggtgacattgtgatctggagcgtcatgggcaaggtgaaacgccatgattgagccgtcgcccatcttcatgcagattaagaagcgcgggttagagcggatggagcgcctgcatcttgatccctacgacctcacccaccttcgggcctacgtggtcgagcactgcaacatcaactacgaagaatgggaacaagcgatggcgggtggcaccatctttggccatcccttcgatcccgaagactttgcctgtatgcaggtgctggtaatgatctgcaccaaacttgaaccaccgagggagaaccagctatgtggcaagtagtcgccttcgtgggcgctattatcatcgtgggactaatcatccgcctgtcagaagtgtaccgcgaagtccttagccccttgagcaacaaggaaatgctccagctgtacgcagacagggcggcagagcgtatgattgcagacgggctagaccccacgcgcatcgaggacattgacgagttctacaggaagctgacgttcaccgacagtcctgaccccttcctcgatcactactgtactcgggtgtacggccagcccttcgatcccttcaacacccagcacctgctggccatctgcgagcagtcatacccagcctaccaacaagcccactacctcatgcagcgggaaaggagaacccagtgaacacgctcatgcgcgacaaagcagaaaccatcttggagcttttggaccagctgattgaggaagaccggcaggctaacgcagacatcaactattggggaccgggtgacaaggatttggcggctgcacgcgccagcatggctgcatacctgacgggcatctgtccagcaccgcacgcacatccttccggctacccctacgacgacccatacgcacgcccggctaccttcacccgcgatctagtcccgccaaagtctaactccacgtcccagattatggaggctgcggcggagtctgagaataggaggaaggacaggaaggaggcaatagacctgcttcggatcgatcaccccaacctagctacgattctagagcaggatagggcgctgcacaggtacaacgaactactcggtctggagggtagttctgaactgattgcccttctcaccttcctgaccagcatcgagcagcaggaccagcttacctacacgctgaccgccaagattccccacactctgggaatccacatcctgctgcccctgctgcccaatctacccctgtgtctgcaccaccacagccccgcagggaacacggtgcacaccctgaccatcgaccacctcagtatcgacgccctcgacccagccagcagccacagggtcatggaggttacggtcaagacagagcgatgcctgcccgcaaacatcctgggaacggtgtggcactcctaacctccctccggcaatccctattcccctgtccctccactctaggcccagccactccccaccccggctatcctcccctgcacattccctccggcaaaagcttcccaccccactaacaaggtagttagggatagggaggatagggagacaaccatagcagcatagacagtgagggaagagaatacagggaagaacataggggaggaagcatagacaggggataagcctactgcacacaatacagagagcacagggacataagctggtatccaccccatagagaagaaggagcataggaagatcatgcaagagatagcagctacgcatccagatcatacgttccagaatgaagtaaccaccctacaggagcagactaggcagttagtagacaatgacctaatctcccccccctatggtcagagctatcctctcggagcagcgctccaccgccctactgtctgaccgcacggcaatcattggtcatcctacactgactgccctgcttaccaacccattcaccatcacgggaggatcaccctattacatcctgtcgctatggggaatccacgtctccccattgctgaccctactcgacacagcgatccaagctgggcataacagctgtgtgatcgactgttctcaatcggactacaacacgaaacacctcacctactgcgtgaccatcctgtctgccgacccaattcggggcctagtgtcgatccactgccgccatcccttaccccaacacctattgtcatcgcatccccatcaaaaacctctagaagtcggttacacccactgagtaatcgggcagataaggcaacagggtgccattttggcatcatctggacaactaccggagtttagggcagtaaagaccagtattttcgtgcgaacaccttgcagacccctagggcttcccctttgaacgagtggaggcccttctttttgaccgaaatatgactgattgaccatctgaatgaccggagttgccattttggcaccttatagtagaggccgaaagaagattttcttctcggacctcgggcatcccctcatgcgttgccaaaatggcaccgtcggagtgtcggaatacacccgaaaatggcccttgacgtggtaccccacagggcgaaaaatttaggggctccaggatgcgtctagacacccgatccttgccaaggattaccgagtttgacgcaaggatttttcaaatattttgagtctgagcaggccaatcctgtaaatattgggtgtgggcaaaacagggtgccaaaatggcaacatcactgccctgtccgaacaatttttcgacgcagaacgcaccctccgtccgagggtatgaattttttgatggccgagggtcaaaaatgaccaaaatttcagatattttacccgacgacgcagtgaccgaagtggtgcgatctgttttgcatcgcctagtggtggtccgaggcctttccctctccgaaatcatcagggacaacagcgatattgatcctgacctgttcggggcacgacttttctcagtgatcgccaacaccgaggtgcaaattcctgtctcaccgaaggggaccgaggcagcgctctcagattcaagggaggaccgagggtacaagaggggtgtgcgcgattatgtgctgttccggcaggacaagagtggcaggggacgtcgggagtacctgcacgtgagcacgaatctgtacgggtggcagcagtccataccccaggatgcgctgactcactttgagagcgtagaggcggtccagaatcgggtgaacgggatgcgactcgatcccggctacttctactacaccgctaccgctgacgatctgatagacgaagcgctgcataaggtagggatagtccagcatgctatcgaggtggccgaagatgtttaggatcagcccagccctgtatggggtcaagggatggaccgagttggcttccgctgtgggagtgaggaaacgtgggaagagtaaatacactaggaagaggggtaagcggaaatgaagttgagtgacattctgactgagcgggatttgattgatctggcagatgaggtgtcgtccggtaactacgaatccctgctggagaagctgggtgggtatgagtttgaaccaccctatatgatcggggtagcggtagaggcacacaagcttgcaacgtgcgctaccgaggatgatcctcccctgatatgggatagcgtgtcgccggagtcgatgcagaagttaggtgaggggctggccgatagtatgcacaccctgcccatgcagccgggtaccacacgcaggttgctaggcaagagggagacagactggaacctacgagaggccgtgagcttggctgaggctcgggtgttccgtagcatgtcaggactcagggcagtacgggttgatgagaatggtgatcccctgcgaggaccagcatacgaggcgggcgagtggagtctgcgtaactgggaagcaatcaagcgtgaccaacaaggagaaagcaatgctacagattgaccgtgaccgatatgatgaggaagcttacgtgcctctgacgctgggtcagatcatcaagtgggtggagacacagccggaagggcaatgcttccatggcctgcacatgccgcacagctaccggggctactaccaatgcttggcgttcacccctagcccggagactctcagcaaggcagaactgctgcataggcttcgggaaggcgtaggcgtatacgacgggtacaagggtggtgtctaccgcatgggcctcgacaccgagtgctaccttgctcgatacggtgagacgggtgcgcccatgtgcatgcggtggctggaggatgaacttcgggtaacggtgacgatggtgccggagagtacagcgcgcgcatcacgggatgccgtagccgatgtacaatcagagacagcggtggaggaagcacgggatgcgcgcgctgtacccgtagaccctgtgtccacccatcacgtgcatcggggtgcagagtccctgccctgctactgtgcacgcacgacagaccacccgaacggccatgagctactgtgggagaaccccgcacctcatgctgctggcgcaccgtcgccctctgcccaaatgaagatcagtagcctgcctgctgacaagatggacccggtggatcacctcgaatccctgcctcccgatatgcgtcttggttctgctgactatctcgactaccttgactcggatacgccgatgaccaccagtgatcccaacgatttggttgaacgttgcaacaagtacatggcgctgcgtgagcgagccgaacagggcttgtatgcggtggcgcgcgctgcacaggaaatgcgggcggtgtctcagcgtggtaaggacgcagccattgtccttaccgagactctcccatctgagcagatgcgtcaaagcattcggtctaccgttgcgttcttcgctgcacaggaggagcgcatgaccgacattctcaacaccctctcggcagcgcgcgacaatgctttgcagaagggtgactgccggaggattgatggccagtggtacgtctgcactgatcccgatatggcacgcttcgttacctttgatgggatggagactccgtgcaccaacctcaagcgagcgtatgatgctcttcggttctacgttgatgccagcgacactgagttggaggaacgtgggattgatcgcgctgaggcactgcgtcttgcccgtgatgctgagcgcgcgctgcacaaccacctgagcaaggacccagatgacgtgtggtgggccgaacccctgccgcttactgctatcgaccacggtgctgtcgttccccttgataccgaatggcaggtgaccaccaatccggtgcctgccgatgctgatcttggtggcgaggatggtcccgtgtgggctgtgatgctgccgctgtccatcgggccgaacgcctactacgatccttccccgctgatccagcgtttcaaccgaggctcccacgtccacttcttccgtaaggctacggccacgaagatccgcgatcacttcaacgcaatggtgcgcacgagcaccgaacagccgttggccgagatcgttcaccacaccctacagcgacacgtacccggagacaacaatgcttgaccttagcaatgacgaactggccaatgccctcaacagcatcaacatgcagaacttcactctgtcctcgggcacagaggcgatgcagggtatcgcacgtggactccgcgctttcagctctacgcgtagcgccctgcatgaaatgcacctcaccaccgaagctctgcacgctgagtggacgaagaagctggaagaggccagccatgaacagcgcgctcacgtactggcgatcctgagttcccttgcacaacagcgcgcgggtctgcacaaagcactgaccaccatcacgcacaccgaagacatgatcctctccatcgccactgaactgacgggcgttaccttccccgcggaggccgcagaatgggtctgagtgattgccctaagtgttgggacacgccgtgtggctgcggccaccagtacgaacagtggacagaagaacgtctgcgtgaccacatcaagatgctggaaatggtgcttgccaagaagcaggcgcaacgatacaaaggagagtccaagtgagcatgtatcgagttgtgttgcagcctgtatgcagggcgttcggcggttgggtgagcgacccggatcgtgttgagcgcagtcacctgatgaacaccacggatacactggcggtgttgcagtttgacgacaacggcgaatccaccggcaaaacgttgtcccagacctacctgttcctgtgcctcggtgacattgtggaactccacgacgaccaaggcagcatcggacaccaccgcgtactggacgtgatggatgcggaggtagcgcaatgaacgtggtacaacatcgggaagctcaaccaccatgaaggcgaggtcatcctgcatcccggcaccaagtacaaggtatcgcaccactcccagcacactgatcccgacagcgggcacatctaccacgtggtccacctgaccgcacacagtccgaagcactaatccgaagggcctatcctgctaacgtggggtaggcccttttgcatagcccggcgataggttccaatttcgtgcaagttgtccctgaatcgaacctgaacggcagctgaacgaaaatgaacagtggttgacagggggatagggtccaggcataataggcttgtggtagggaaacaagggcgtcagcccaccgggacccacctatcggaacccctagtcagatacctcggagaatctcatgaagcgcaagtcccctcggaaccgtcccctgatcgctgaactgatgccggtacgcgctgccgccgagcgcatggaccttcggaccgccaacctgtccagccacctgatgacggtggagtttctggagcaggacgactcccaggttatcctgaccttcatgctgaacaagaatgaccagctggtggcctcggtggaactggaacgtgcgggtcatgtgcagtgcgccaccccttacctgcgcggtgccatgcttcggaacagcctgagcgccacgcttgacgactatgacgtggagcgcgaccgcatcgcctcggtcatcgccttcctcgacagcatcgtctaacccttcggagcccctcatgaacgccaacgtcctcgccctgatcgtacagaccgccgttgaaatgggactggtggtccagcatactgccaacgacattactgtcctgtttgatgaatcggagatggaagcggcaggcatgttggtgcaagctgctccggcccttcgatttgtgtatggccctgtcctgaccgcctaccccgaagctcacatgggataccacgaaggggagttgcaggccatcgggttcgccaccaagggcgttcggggcgacgaactgcgcgactgcatcgaaaagatgaagacccacttcaagcccgaagccgtcatgcccctctttaccttcctcggcctgctgaaccgcaacgccgccaaccactaaggaaccgaccatgaagatcaagaccatcccgctgaccgccgttgttatctcggccatcctttgggccgtcgccatgattggcagcgccccgttcgtcggccccaccctttccaccaccgtccgcgcctaacccacccagcatccaaaggaatgaccatgagcaagtaccccgcaatcgccaacctcgatcacgtcatcactcagaccgtccagttcgggctggatgactacgcgggccagacggatcacgtgcccgaggccgtcgcccacagcatcgcctacatcgccagctgcttgatggcccagcacaccaccaatggttacctcggcgtgcccaccgacgccgccctgaacgccctgcaaatcaccacggtccacatgagctacgaagaccgactggcgctgacccgcgccttcattgcagaatacggcggcgtcaagtgatccgcatcctcgccctgctgatcgtcaccctgtccaccatcctgacctaccggaactaacatgaacgccaagaccaagaccacttcggacgtcaacgcacagcgcgatgccatgcagaaagccaatgcggccgagcaattccgtcgtcactccctgctgcacaccatgacggccgacggtcccctgttcgtccccctcgacaaggcccacaccttcggcctcgcccctgctggccgtggcggtgctgcctaccttgatgcactggaagccctcggcctcatggctgcactggtgccccacgcaaccaacccggacacgtggggcggctacctcgtctgccggtccagctgggcacgcgagcaagtgggtccggacgacgccaagttcctctgacccaccctgtaaacctagattagaccctgccgccttcgggcggctttgtcgtgtctgccctcccgacctaaaggaaccatcatgaacaagctctccgcattcttctccaacctgatcgcctcttccgctaccgacattgacgggttctccatcaaggtcaaaggtgagcgcacgctggaactgctggatgaagggcgtgccgctgtggccgaccctgagttcgtgcagcgccacggcaactactggcacttcgtcgaacagaagcatcccgagtacctgctggtcagcacgggccgactggtcatcgtcaaggtactccccgacaacgccatcgacgcagccgcatgagtaccgacaccccgttgcccaacgtcgaggccgtgacccacaacaccttcgtggtgcgcacgcaagcaggcttccgacaggccctcaaagcatggggcggtaaggtaaagggcgacacgattcacgactggcccaccgcctatccgagtcttgtcacgttcaccgtcggctactgcgggtatcattacgtgcagtgtactgccatccacctcaacacactgatgcccgtagtgggccggcacgcataaggaaatcccatgcccgacgttaccctgcacctgtgcatcatctgagtcctctaatttcaggtgtcttcccctaagcagagaaaccatgagagtcctgtctaccgtagggtccaacaagttcgtctggaccgatcatcacctagactacaccgcacccgaagacgattcgctatctagtgagactgcttcctccgaagaacacgctcatgcgttgaaacgtacttccttacatcccgaagaccaaaaagggcacaaggcacacgtaactcgggcacgccaaacatccgaacacgttggccatgcagtagatcactacagaagtatcggacacaacgattttaaccgagaactccgccatccctcccacaagggtaagatcaaaggcaacggtgactacaacttcaccgaccattcgctacatgatctgcataaaggattggggcacgctaccagttatcagctgaaacacaagaccgctgtgtaccgtggggtgggcgaagccgcccacaagatcaaggcgctcaagaagggagacaccttcactgaccacgggtacaccagtaccagccatagcccctcagtagccatttcttccttcggtcatagcgagcacacgggtacgcatcgagagcatcacgtcgtcaagattcatttgcccaaaggctccaagattatgcacgtacctcaccacgttgatgatggccttacccggcatgaggcagaaacggtgctgcaccacggtaacaagttcaaggtcttgggtcacagcgtccacgatctaccgggtagtccgtccggacactcttcctcattcgatagcaccaagcaccgggtgcacgtaacccacgtcaagctagtaaagcaacgcaaatgagcgactcaggcatccgaaagggtgcctttgtcgtttctgcgctcccgagtcgagggtgccattttggcatcctgtaaatatagggacaaaggaggcgctatgcccctcaaagaacgggtccaacggggtggcccttttatccccgacttcgtagacgttcgctacatcacccatagcccaacaaggaagccccatgagcccgaagctctgcatcatgaacgacacccacaaccagcagtcggctgtgatcgtcaccatccagaaagacgcgattgaccacacgataaagtttgcctacgagggtgatccggagggccctcgtttccgcctgcccaccgatcggggtagcctgatgcgcctgcgtgacctgatcgacagcgtgcttgatccgagcgtggttcctgtcaacaccctgcgtcagctggccgaccgttgggcagctgatcgtgactacaagggcagcccggttgacgacattcgcgcgctgattggcgacacgcaagattcagcacccaccctcgatcccaagtatcagacggcgttgaagtttgctataggtcatctggacatgagtgaccaacccgagtacggacagctgcaagaactgttggccatgaccgagcgtgggaaaggtgcctccaacccgtgcacgcactacgaggacaccacgaccgactgccacgtaggaccgaactgcatctgccaacacaaggattaaccatgaaactttccccagctacggccgatgcaatagccgactttattcgcctgcccatttccagcacgtccccttgggaccgggtatccttccacataaacaagacgctcaaggccactgccacgtgtggcacttcggtgctgacaattgtcagcacagacgaacacgactttgcccagcagttgcgcttggtggtcgctggtgctcgccgcatgcaggtaaaggaagatgaggaaggctgtgagtgcagggacggtgaaggatgctccgtgtgctctacgttgccactcgccagtgctcgtaaggcgtgcaagcgcgtgcgtaggactcccgaagaggcagtgctagagtgtgacgagtgcgatgccgatccgggtgtgccatgtgactgtggtaccgagaatgaggacaacgcccctctaggggccaactagaagcgagcgccgtgatgatcgcattgttcaagatcgtagtgaccttggcgttgatcggggaagcactatgtaccgcgtgggccgcgtggagtgatcgagctttgatgggacgcacgtacacaatcctcaccatcatcgccgtgttgtttgcggccctcgcagtaggcgccattacctaccgcactctacagttggatgggacactatcatgaaccttgacgcactcagcgttctcttcatcgtggtattcgtcctgctgtcgtttgtgttcctgtggctgggacgtggtgcatggcgtggtcgtgcgcgtaccggcatcgcccctgtcttcgccagcgcctttggtttcggtgcctgctacactggcatcctccttctactggaaaggctatgaccaacaagaccttcaacatcaagaccgagttcttcaccaagctgtgcatctacctgatgctaggtggcctagttactggtgtgatcgaacgccagtacgccaaggagtgccccggtgaggccggtggcatgttgaccatcaccgaagctgggatcgtcagcgccacgtggcctgcgttgctaggcgctacggtgttccatctactgaccaaagatggggccgaccgtcccacccaatgcaagagcgcccgaggtgatctatgaccttcgatctgaccatccaaccaatctcgggttggagcgaagaaaggaactgctggctgcacccgcctagcttcgccaaggtgtacgaagccagcctcgatcccgaccacctgttgctgcgtgtggttccccaccgtcacagccatagcgtcagctacctgagcgtcaaggcccaacacttggcggtcaacgacgtggtagtgtggccgttccctaccggcgagcagttcgggatcatccaccacgtaccgagtgtgatctaatggaagaagccgttagcatgctatacacccacatagactgtccgtattgtgacaacacctttgaggtcgaaggcgatcaacgaggttccgtagtcacgtgcgatcattgcgataaggaaatgttggtatgaccaaccacgaacaagcaatcaccgacgcactgtggagagacaatggacacaattgacctgagcaaacccacacgtgtggtcactgggaccgtgactatgcctgcacctgccttccagcagattccgaaggccaacacgtacactcgactgtacaccccagctgaaaccctcagtgacatgggccaagagtttgacgcggcgctgcatgctgctgtccaaccactggttgccacctttattgagcgtggggccgacagtcacgacatggaagcgttggccgtcgctatggtgaccagcgagattgccagtctgcgcatggcccggcagctgcgacgccgcaacgaagaacgcgaggcagagcggttgcagttggagaccgacattttgcagtatggggatcgtgcctacgaactgtggtgcgaacaccagcacaatgcagtcaagcgagagaaccgtccaacttactggagccagctgcacccacaacacaaagccgcgtgggtcattcgggccaagcgcgaggcagaacagacaggatgcgaggaggcccacgatgaatgattgcccgctgtgcaaagcaactcgacccacctgcccatacggtcccgtggtggccaccaacgtgaagaccggcaagaaggtatggctgtctagcgcgttggtccagaagatcatgaagcttgtgcccaataaggaggctaccgcatgaccgtcaagctcacaggatggaccaaggccgatgggcacacgttgtggatgacacaagatggcgaacctgtgttccgtgaaggccacctgcctgacctcggccccaacaaagctgtgcatcttacgggcaagatgccgctgctggacgatcctcgctacctcaaatacccaggttacgaataccttgaggccatcagcgacgatcaaacccagtacctgatcgagcccaagcgcaacactcgcctgcggatacgtaggagcccgacgttggtaggtgggtggactatggacattcggtcgtatggtgaatgggttgtctaccttccagacggtagcagcaagaccatgatccaagatacgctcgacaaaatcattcgctacggtccggtgggcgaatgaggattttagccaagtacggcaccgggagttcagctgtctacattgcagtggatgagagcactcccgatgttgagtacatcgtaacctgcgccgtagagctacagattggtcagcaagttgaggcgtccagttgttcgctgcacacaggggtgcacacgcaccttccgtcttacctgtcgttcccatacctgtactcagccatgtccggtttgtggatgctgtgccgccgtcaaagcaataggcgtgcgctggtgctgggtttaggtggcggcaatgcctcgcgttacattcgctacacgtggcccgatgtagccctagtgtctgtcgaagcaagtcccgaaatgatcgcggtggcaaagctgtggcctgacgtcggaccagtcattaagggcgatgcagtgcaagtggtcaagcgtaccgaagctgggtaccttgatttcgtgctggtggactgctatcccttcgagaacaacacgataggccagcggttcttttcaaccgagttcctgcgagagctacgtagtgtgttgaccgacgacgggatcgtggctttcaacttcattgatgacgtgccccagctacccgtagcggaggttgggttcaatggaggtgtgttggtgcgaagccctgcgcggttacgggaatcaaacaaggtggtgatgctgaccaaggcgccgcttgatcccaacgagtttgttaccgagtgtcattcatccaatccagcttacgctttgtcgcggcagctgactgactttacctttgaggcatacccatgaaaatcattttgcaaatccgttggcccagcgatgctcctgccgcagatgcagcagacgtgccccgtatcaccgaccgcttgttcaatctcacgcgtccgattctggaagagtacgacgcaggcaactacaatctggatgacgtgatgactgcgctggagaacgcagggttcctcaacccgagtccctaccgtcgcgccggtgttgtctcgctcatctgcccagcccacgcttacgaaggtgcggccgatcttgtcagtacggtcatgaagagtattgctgggggtaccgagagtgcaatcattgtgttcaccaatccggacattcgcattggtgcagaggttggcatgttcgtggctggtcctcagttcacactgctcaacgtgagcttcgaccccagcaagttcctgtaaccaaggagaccgacgatgacttgccactgtggatcgtattcgtgtatggactgcatctgtccagatacctgcggtctatgcgaccgaaagtggcacaagtgccagtgtagcacagagccgcgtgagtacgagttggagaacggccgcaagtaccgagcggtctacaccaagacgccgtttatcgacggcgagtatccgaagggcggcatcgtcgtgcacgtgtggagcaccgaatggtgctaccttgccaactgcgaatcgtgggaggcagtggacgaaatgatgcggttgctgaaacggctgcccgaacgcaaggagagaaatgatgggcaaatggattgacaagatgcaggtagtgcatggcacgaccatagccgagtacaaagcaatcttgctagagcgggtacgccacccttccaagatgtaccgagacttgggatgcaagcctgttgtcaagcctatctacctgtacgaactgaccgacggtacgattttgaacacagggtattatccattgtgccgttcgctacgcaccatgctgggtgcctcgatcaagagcgaggaattttggtacggcgacccgagtgtaacgccgctcctgttcgcgcatggagcaatcgtctttcctcaacgtgtggagaagaccgcatgaatggtactggccttggccctccacgtccacgcgtggtgacactgtccgagttgtacggtaagccctaccctttgattctttcgatagatcgcctccttgagggcaaccacttaccgatgagtaagcccctcagtagagacgaaatcctcaacaccgattggaccctcgtagttcaaacctttgcgctgattgcgttcggtccagaggatatggtagctgagtttgaacgtgctaggaccgaggtcaagcgtccgctgcacccacgcacgttcaagaagaaccgactggtcgaaggtgtttccctagagggcaccttcctgatccaagggcctttgcgtggttacgcacccggtgacaacgtgtggcaactcagcgttgattacgccgttaacaggaatcgaaaatgacacacattgtcgcaccaaagccgaaggaacgttggctcaaggaacagaccaccaagttccgtcccctctacaacaagcgcaccaagcttggttcgggaaacaagctcacgttgctcgaagagtggtggacggttgagaacaccgatcacgtcgtagtggatgatgacggcaagcccgttcgcttccacttcttgccgatggcacaaatctgcgccgactctgtgaacggtcctaccgtttccctgcaagagcagacgcgccagattctacaggacgtggtggaccgaaagatcgacaacaacaaagcagtggctttgttgtttgcagtctatgggattgacctatgaagaagctacttaggatcgtagatgattggtggttgttcatcggccgtgctgccatagtggtgtgcgttacgttcgttgtcggcatgattgtatggatcaacgtgcttacgatcaagtccaatcgtcacgctaaagaatggtgccctcgacacaacggcgtgctgatcgaagcaggttccggtaacgtcaagtgcgtcaagagcatcgaatacttcaccgaagaggaactcaaggcgccatgacacccaagaccttccacatacaggcaggatacaccattacccacggcgatctggaggtaaagaaaaaccgagtccgctggcgaggtaagactatggtgtacctgggaattatggagcacgttatccagcgtaacgttcgtaaactactgctggcagcgtaaaggagtcatgatgcacattgtagattcgggagccttcacgatggcgctcaatgtactgcgccgtgcaggtaagaccgaagtagctgacgaactagagaaggccagcaggacgctgcacccacgtgacctcgctgaggcaatggaccatgtgctacagaccaagaccgaagacgtgatggacggcggctactacgaatcgcccaacacttcgttaggcgatgatgcactggaacaaatgaccactgtgatcgacggcaatctctgcttggttccgtttgctggtcgcgtgctcaactcaatcaaaccataaggaaagactcatgccatactctacccgtaatcgtggcctctacatcatcatcgcgttgctcacgggcatgctggggttccataacttctacgcaggtcacttgaagaagggtggtctccagttcttggccaccgtggtcagcatcctgattatccccgtgactgccatgctgtctgtcctgatttctggcggcgatgacagcggtggagcatccaagctggtgatgttcgctgtagtggctgcgcctgtgctcgcagtgtgcaatgcaatcagcgtgatcctggacatcgttgaaaccaagaccgatggctatggcgatttgatgcgttgaagaagaggccccaattggggcctcttcttttgccggaaataaggagagattgaagaccagttaaggccgagggcaagcctgcctaatttcagatgacctatgtagagcatctaatatgcgcatcctcaaagcaacaaacagtgccgacaagtctacgccagagcccaagtatgaaggcattagtgctgggctgcgtcgcctcgaactttcgtacattgatgacacgggtgtcgccaagccaaacagtgcgcctactgtgcatcagaaaaatctggagaacgtggcctacaagaatccgaagaaagcatacaacagcttggtcaaggatttgcgtggggccaagcatttcaaaaaggactacgcgtacatcaaggtgaagaatactggtcatggtggcgggcatcgtctccatatcatgcacgttccaaccctgcacaaggaactgcacaggatgcacgcagcgtacaagtccggcggggagactgctctcaagaaagctgtcctcgaacacgctagatcaaagtcggggcacggacatgcaggccatgtccgaatggtaggcgatcaggttggcatggcaacgttgcacaaggaacacacaaagaagggagtgatgcacgatctgtatcaccaccttgttaccaaggaaggcaagaagctccgaagctcctcgcaatccaagggcgctcgggcgctgtggaccaagctgtccaagcacaaggacttgcaggttcacgcgctagtcaaccacggcgacggggtagtcaagctcaagcccggattgacacacgcatctggccatagcgtctatgacaagaaacacaagcccaacaaagacgtgtacgctctgcacctcagcaagaagaagtagcccagaaaggcccctagaaataggggccttttcttttgccggaaataaggatgggttgccaaaatggcaatcctgtaaatataggatacaaggaggacgatatgatcccagactttgacctgtccaaagcagtgcgccaaaccaagttcgtgggccccaactcgaagacaggtaactgcactgaggcggctattgccaccctgctgcaaattcccctaagcgccgttcccgaattcaatcgtagcggagacgacgcatctgacttttgggagagcgttgaaagcttcttggtagagcacgggctctacatcaagtacaccaccaagcacaaacaaggtgtgtatctcgtaagcggccctacggtaaggggccggggtcaccacactgtcgtctacaaggatggacagttggcgtgggacccgcatccctccgacgcaggcgtcaccgaagacgtgtggtgcctacaccttcaagacacggatccatacgcatgagtaccgactggagtaaagcaatggttattgactgggaactgcttgcccttcgtatgcttgcagccaaccaacttggcatccgcattgagcaaagcgacggtcatcgttggatcatcgaagacctgtgttctgaattctgcctgcacctgttcggggagcctgtacccctcaacgtggtggaccctgagcgtgaagcctaccaaaaggtatacggttcctatagcgctgccctcgatttgattgacgaacggttagttgccaagggccacaagattctggcagagcaattcgatcacatcaattaccacaacgacctgtcaaacatcttcggagacggcgtgcaatgattttcaatgaggatgaactcaaccgaatagccgatcagcttgtgggcaagaccgctgagatttgggatgcacgtacgatacgcgaagtagcccgaataggcgaagttcccttctacctgaaaggcaccgtggagcaaatgactgtaagcgctcacgtaggcaacattgtcgcacgtgacgaacaggaccaacccatctacctgacgatcaagggctgcatttgctgggagggtcgatacactctgcgcgccgacctgaactacgaaccgtacatgggctctgtgggagccgtccctgttgacattgaatggaaccaaccatgagcaagatcaaattcccgcagggcatgcgggcctatcgtccaccgatgcacgcaccccgacacgccgttacggcactgaccctcgatgttgaggaattcattgcattcctacgcgagcagaagtccgacgtggtacgcctcaacgtgttggcatccaagggctcgggtcatcattacgtctgtgtcaacgagtggcgaccgggcaaccctgtgcaggaagaggcacgtgcgaagcgtgcgcctaagccgcagccggatcatcatgattacgaggatcacagcgttccactcaatgacgaggatattcctttctgatgctaggacctactgataccatcacagagttccctgtgccacggccccgaacgtatccctctgatggaatgtttacatgggaagggcatcgcatccacactcacagcaagcccgagccgcgcaggcggggcaagagtaagtacacccgaaagaaggggaagcgcaaatgagcaagaccctgttgacccagcacgctgaggctcataccaacctgaccatgtttggtgcgatccagtccctgtgcgaaagcggttgcttctacggtggacgggtccacccggcactggacaagatcatcaagatttgcaaggccgagcagcgcaaagaactcaagatcatggacaaggctgcggagaagctgaaatgaaattcgatctactgaccgcgtatacgatgttcgaccttgcaggtttcaaggtcaccagcatcactgagattccgaacgactattggcctcgcacctccctgtacgaacagctgcgagccgaaagtccttggttcgtcgtaggcactgacttcggtggtgttcgcatcggttggcgcaagcgcgttatctcgattgagtgggatagcgctatgcacagcggcatcatcaccgaggacgacaccaccaaggacccgcatatggttcacgcgtggagtcgcgctgatgcagtgaagtaccttagcaaccttcgggaggcagcgtatgcagccaagagccgcaggcccacccaagtacaggtagaatccaatgaatctatgtgagcttctgcatcgaccgttgttcatgcccaaggacgcaatcaagtgtagctactgcggctactacaacatgcccaatacggaacgctgccttggcttcctgtgtggtgccaacctgcgccctaccggcggcggattcgtggagttctaatgactagcgcgcctgaaaccacaagcgttacagcccgtatcgcacagtccatccgtgagcagatcggtacggacttgcctacgatcactctgatgaatggacagatcatcgacattcaagaactggcgcgtgctatcgcagcgcgtctcggacctcccaagccatgaacacatacatctaccgaccgtacatccaaggccccggcactcacatgctgacggttgcgacagataggcagtctgccgtagtcaacattgtgcgcaacctcaagcactatttccccgatgacgttgccaagttcaaacccgaagccctgacttctatggtcaacgggcaaacgtccatcctcctcctgaatgataccgctgtcatcctgccgcctgatagcaccgtgtcgattggagtttgacgtgagctactcagtgttgttccggccgcagcgtggcgactttcaaactagctacgctgagactgtgcgagtacgtaacacccccgagggtattgctgcacacctgactcagatactcggtcaggtggtgggcccttcgcaaatcacattcgaggatgcaggctttgacaagcgcctcggtaccaacaatcaatacgttcttctcgacggccaatgcgtaggctacgtttgggaaggcgacgaaatctaaaggacagaccatgcttccgcaagcccgttacctcgttgctttcagcaactgctacttccacttcacggacacaatgatgccgctgcgcattcttgaaaactgcgacgtggccattcagatcaagccgaacatggagctaactctcatcaaggttcgtaccgacactgcgctgctcaagctgctgaatgccgagacttcaaacgaaaccaaagacctgtacgacggcaagcctccgagagaagacaagcgtgattggcgcgcgttcaagatcgagtgcatcaacaacagtcccatcccggctccactcatctaaggggccgcgtatgggaacttacattggtggatgcgccgagcgaaagactgactcgggctgggaggttgtagagattcacctgccgtggctgctggactatcagtgctacgaatacttcggatggcttggtggggtgcgcaactatgcagctgtgtcctcggttgccgaacaacgtggcctacctgccgacgtatccaaggaggctgaggttgagtacgatcactgctacgatgctagttcccctagttatgtcaccgtggaggaactgcttgccatcgactatcagcagttggttgagaaccgtagatgggatggcacgcatctacgctcagggactttaacgtgcgagccgggtcagggcgagacgatgacccttgaagaatacctcggtccggagcgcgtggccgagattcgttccctgccagataagggtatcgaccgacttgtgttttggtttagctgaggatcgtcatgttcgagaaaatcaaacgctacttgttcgtccagttgatgcggtacttcatccacgacaagatcaagtggcaggcaatcttgcacgtctactggattgaataccgcaagcgttacaccgaagagacgacgcccacttcccttgacagcatctacactgtcttgaaggaggcatccgaacgtgagttggctgccagcgcacgtgatcgcaagattcgggaactcaatcagcaagtagcacaaatcactagcgagaactatcacgactattgggactaaaccatgaaagagttaggccatagcggcataatgatttatccgcttactccgttgcagtccgaagcctcaaagattctcgcggaagaatgcgtagagcttgcgaaggaatgcagcaagatcgagcgttgcggtttgccattcattgcgactggtgaagcactcacgttcaaggaaaagttcactgaggaaattgcggacgtcctcacgctgatcgacgaggcaatcgctgccgggttggtagatcgccagcgccttgtccaagtgcttgacaacaagcccgcacgtctgcgcaagtggacgacccaccttggctacgctccagtgcgttacgccaatcccctgctcctcaacttcaattcttctgacgacacttcggatcgagactgactatgaccattcgctatatccacctgcgctccccggtaatcccgtacctgcaagaaacgggtgaacacttcggcggcatcactgtggcctacgaactgtggaccaccaaggacccgaccggcgtctcccacctgttcgccaacgtagcactggccctgtgtgatcaccgggatcgttacaacaaggtggaaggccgtcgcattgcttccgagcgcctgcgcaatcgtctctcggtgtctccgctgctcgcgttcaccacgcaccttggcttcgctgctatggaagaggaagttggccacggcgtcggttcctatatggaccgcttctacgccaagctgacgcgcgacgcttcgggtggcatcgacgtgaacgaacgcgaaatcaaggtcaccaagattctgacccaagttgccatccagcatggcgaggtttgcttctactcttggggaggcaagtaatcgaaagggggccttcgggccccattccattgagggacataccatgcaatatacaggcggctgcggacctatgctaatcagtagcagtacaaagtggctcaccaagattcacctctcccaagaggacggcaaatggaaggccacatggaaaccaactaacgggtaccacccaaaggactgcccttctttcgtgttcagcgctgcgactcctgtggaagcctatgctactacaatggccgaagcgtccaactacctgctgtgtattttctggcaaccgcctcggacatacaacggaaggtacaagcctgcgcatcttgcactgctcgatgcaatcacgctccaagctaagagggatcgcaatgggaattgaaaacggcgtaggactgagttacaacgactaccgagcaatgaacggtcgccagattgtgtggcgattggtaaaggaagcgaacggtagcttcactcacattctggaattcaacggcaagcgcggcatcttccccagcgatgatcccgaggatattgagaagcattccaagtacctcaacgcagagtcctacctgcgcgctattaacgtggtcagcaatggcgacggtactgcaaccgggacaggccatctgatcgtggcagaagactacttcacctttgcgcttgcgatggttccgatggttgttcgccaaggcaggcacaagggcaagaatctcccgattaagaaacaagtgtgcgtgttcaaggcaggcaagatcgccgactacctacattccgaggccacggtatgagcaagatcgacgtacaggaaatcatgcgcgaagtgcgtgagaacctagaccgactgcaagcgtgcaagggccacaagtggccgaagatcgaacgtgagaaacgttcgccgttggagaagtacacgtgcactgaatgcaagggcaaggtcggcttcactgaaatgctctactacgtgcgtggtgctgtgcactacggcggtgtagaccccaacacaatctccccggagtggccgttcaaatgagtgatagctttgtagtgcaacagaagctgggaacgaagtcgctgtatttcaccaccattgatcgaggcggtgccgtgtggtccgaaggtgatctggccaaggccactcagttcgcttcggaaatcaatgcacaggacattgctgaattcatcgccgaacgtgccgttggaacttgggaggtagtgacgtatgcgaccgccgcagccgcgtgaagtttggacccacacaaacgggagggactacactgtcctgctgatcgctaaccagcattcagagaatccgaagtaccctccgaccgtcgtgtacgaaggtgacaacggtagggtgtggagtcgcccgcttagtgattggcatcgctccatgacgtacaaggcggagtgtctgcacaattgggtagatgcgcgcaacaagtacatcgactcgggtgaggtatgcctgacctgtttcaagatgcgtgctggcaacccgactacggaaggattcaagatcaactggatcgacccggaattgtccttggtgcatgccaagcctataacggttatgccgcaggacgtaaagaagaccctcaatgattggatcgaaaaggagtaccctgttctatccaacatgcgccgctttgtgggcaggtatgaagaaggtcaaggctacccggtggtgctcgacggctgcatgatggggcgagtggctgttgcttactttgatcgtgacccttcggactatctctatgactaagcccggcatctttctaatccaatgcgagctagaaggaaggctcctcattcaacttctcagtgaaggtggctcccagcaaatcgcccgtgccaatttttacgcagacgaccgtggcgcgtgggtgttcaatgtgctggtgcatgagccgttccgtaggatgaagatgggtaggatgctgctagaaggaatcgcaacctacctccgtgatcctgacaagactatcagcttcaaggtagaccacgacaacgaggtggcgctgaaattctacagcagcttggggttcaagcgaaccggagtattgcagaattcaagaggcgctgggctggacgaagtagtcatggaggctcggatacgaaacaccacggtgagcccaccaaccatgaacaagtggacttatcaaatcacggtatagagtgccattttggcaaccctgtaaatatcagatacctaacacactaggactgtcatgactgccccgatcaggctatacgaccctttcgtcgtcacctactacgtgcaggacaaggaagctttgatggccaaccatcggtccctgttctccgttgatgaagtaaacaagatgcgcttcccgatcgtcatcggtatggatgacgtgcctcagtggatgaatgcacaggagtaccgggaccatctaggcgtccgcatgcaggcgctcaatcgctacctgttccctccggactttaacctagatcgcatcctctatgtaaccttgggcgatcagcaggtaccgattcagcttacgcacgctgagagcgtgttgttgcattgcctgatggaagctaatcgggtagtgagtaacggcgaactcttgaatttgctggagtcgctgcccacacgcaatggtaaggagcggaattacaccaagagcacgcgctctagtctagtgcacgtcatgacgtatcggatacggtcgaaggtgcgccgcatcggtggccctacgctgcttgaggttatgcacggtgtaggctgccgttacgtaggtggttcaaacttctctatggcacaggtgaattgaaatgagcgatccgatgacgggcaccttgcccgcagtagaagaactgaaagacgatatgggcttcaacaatgttggcccgaccttgagcagcaagctgtttcaagtgtgtgcacaagaactgcgtgagtggtatcagaagcgaggtcacaagacctacccggctgacgctccgttcctgacacgcgaaaagaagatgccggccaacacacggctgattctgatctacccatccaaaggccgctacgttgttctgcgccgcgatccgggcaacctcactccgccgacagtcgagtattcgctggcgcgattcgcagtggtgtcagcaaaggcactcaagaaactcaaccccgagagcacatttgtcgtagcacgtgccctgcgttcagaatgctggtgggagtaccctcactatccacgcaacgcacgtcgcaagattgctccacgcgacctgaatcccgttgatctggcagactcttacgctgtcatcttcaccaccgaccttaccgccaagacgccctgattgcatagggtgccaaaatggcaacggtgccaaaatggcaccctcgattattggagtcttcatggccgttgaaatcgaacgcaagtggtttgtgaaatcccaggaatgggagaagcaatccactatgcactactctatcgtgcagggctacttggcaatgtctgccgacgcgactgttcgggtgcgtaacggagacaagggtgcacaggtgtgcatcaaatcaagaaacgcaggtgtgtcacgtcaggaatttgaataccgaatccctgccgaagatgcagatgcactgatgaacatgtgcagcctcatcgttagcaagacccgtcaccttgttccctacggaggtcacacctttgaggttgacgttttccacgggcccctgcaaggctttgttatggtcgagcttgaactcaagagcgaagacgaagagtttgccttgccggaatggctcggtaaggaagtcaccaagtaccgctgctgttacaacgaagaccttgcacgcttggtacgtgctaaccccgacaccaacatctatcgcctgttgaaacaggaaatggaggcggaggatggacgttaaaattcctgggcttaaccttgagtacgtgcgtgccattacaggtgtcacttcccgaaccatagccatgtggcagagtggcaaggccctgccgacgatgaaacagatggacgtaatcgaaacggttaacgccatcctcgccaactgcccttcggtacaccatcaaatcgcaacctcgcatgttctgtcgtatggcctcaagcaacccatcgagggtttcaatacgctggccgagttgtgtcaggctgcgtgtcaggaacgcaacccacaattgcactcactgctgattagcgggattgctgagtttgaggcggagattgaggcgcatgcaaaacgtctagcacgtccccgtgctcgccaccctaaccgagcgtgggaatccgagtacccatcctgctaaggaacgcacatgtatacgccttatcaatacgagtgcaaatgcaaatgtcacgtgccggactccacggtagtccacgatacaccttgctgcaagcctaatcctactcagcaggaaatgatccttcgggagctactggccagctacgcaggcagtccactgttgtatcgggacgatggtgagttgcaggacagtgagattgacttcctgcgcgatcatccaatagagattgccaagaagctgaccactcgggcgctgatgaaagttgcagccgcacggcaacgcatagaaatcaaagagtttgagcacgtgcatccgtgccacatggaaacgtgtgcgtgttcaacgcatgttctgtaccttgatggcgtagcactcaccgacggttcgcggaaagaacttgaattcatcgaacgtcacctccgtagttcactggcgaatagtagtgcatgaacgtcttcaaggattggctcacacggaacaacttgacgctaatccaaggagcaaaggaactggacttggggaagcggactatcgcacgttactgtgccgaaccatctgaggttcccgagataagtatcctcgcgctggcaggctgggagttcagcaaaggcaagaggaagcaagctactgcattgtgcgagcttgtcgagaaactcaaaaagaagaggatgaagtcgtgaccgaacagaaagaaacgtttgaagaattccgagcacgcaagcaagcagagttgcagccgcatctgcaagacaccttccaaggtgacgatgcccgtctgatcgcatcggttgagtccttgattgcaatggaccttgacggcgtgttggtgccgcatggtatcggtggtacgggtcgatccctgctggcttcactggcctcacgactgcgcatcctgaacgaggtcatggagcacgtggaccctgcacaactgccgggccttccttctgaactgcggttcaagctgggtgcctacgcaaaaccagcaggttctatcccacgcctgatcgtggaacccaccacgcctgacgaacatcgtgccctgtcggaacatcttaattcgttgaagcgtgagcagctggtcaccgacgatcaaagtgaagccaaggccaagctgctgaccctgatgcagagtcgccgttccgaacgtgctcccattgatggggatcacaaggatggcctcgaccgcatgttctcggacatcgtgcacgaacgtgctatcgaccttggcgccattggcgaagatagctggttcgagttcgacagtcaggagaagctggaagaatacatcaagcttgtcatgcaggactggatgcccaccatgatcgaaggcaccgaagtcagcgttgaccttgactccatatttggttccgaaggtcgtcgcctgtttggtacggttacttgcgcgcaggagcacaatggtcacaacggcgtcatcctgctgatgcaggagccggaaccaaactggaatcacttccctacgcgagagggtgtggatgcagacaacgatccagtgtggaccggacgctttgaagcgcaaggccagtgcatgatttcgtccaccaccgaaggcgtcgtcatttccaatggggcccgcgttgcgttcctaggcccacgcgaagtcaacaagtaacggagctgtcatgacaagaagtgtatactcagaacgccgcgagcaattccaagccatcttggctagtcgtgatccggatttcctgccctacatcacgcaatggatagactacgaaggcaaccacaagaaccggctcaagatggtacacgacattgaactcaaggacgggcgtgtcctcaccgagtatcgacccaacggttcgggatggtatgccaacgttgatcgcaagggagaacctactcgggttgatgatagtcaagtgaagcgcattcgcttgtccttgcgccagtatccgtgggaggctgatccgaatgatggcaactgatgatggtcctaccccaacagagcaggagctagtccgcgctgctatcgaacgcctgcgtcaattgccggtgggcgtatttcatttcgatccacaacttgcatccctagttcagcaaattaaagcaattcggaggactacctcttgaagcttaaatggcagtcagttagcaagatggtcagcttcgggccgcacacccgaggcatgagaatgcaacaggttgacgaagctcgctatgcgggctatgtcgctgcgattacgccagagaacgttgtcctgattcatcccgacgacacaacgcctgccacttatggaagtcagcgcgtgagcatccatatccacgcgggcaaccgagagagtgctcaggagtttgcggtagctaccctcaaggcactggagaaggtgaacgcgtaatggacttcgtggctggtccgatattgatgtttcgcaacacacacgtggcaatgattcaccgccgcgataacaacaagtgggtgatcccgggtggtaagcctgaccacaacgagttgcctgtcatgacagcgattcgtgaactcaaggaagagacgggcatcgacttgctttcactgggctacatcagcatggatatgcaaccctgctggtttgcttcgcctaagctgggtgtgccgtccaagcacacactcattctgtactacctggtacaggtagacgaaatgtatcccatccacaacattgaacctgccaagcatcacgatgcacaatggatcgacctcaaagaactgggtcgctacaacgtgggctcacgtgatttgcaggcactccgtaacgctcgacttctgcaacgaggacgctaatgcttcttacccataagctgaacccactggtattcctgactggcgcaaatgatcttgaacaggcccgacgcatcattgcagttgaggaaggactcatgcagcgccctgacctccggcaccttactgtgatccccaccaaggagcagcaggaggcccacatcaatcggactctcaaggaaatggatgatgaaacgccagcagcgtaagttcctgttcggtgctctgtacctcgtttgcgttctcctgtttgcgttctttatcaaccgtacttacgtgatcgggaagaacttggacagtaagcagaacgcaatcaacacggaatggtgtgaagaacgtggtggtcacctaacgttccagcgatacccgccacgcacattctgcatgaaggacggcgtagaggttgaaccgcagtatctcaagtccgaagtttggattggcactaccccttaataccgcaatctcaatagtgtaaataacctatgggtggtatgctccggcatgccgctcatttttcatttcccaatcggagtttccatgtctcatcagcaactcaatgccaacgtcaataacctcgtaggcaataccccgaacgcccacccgctgctgcgcattctgacctcgcagggtcggatcatcaagcaggaagcggaagagttgatggccgctattctggccaaggacattaccgaagttcgtgacggtctgagcgacgtgatcgttaccactgacggcatgtaccatcgtctcggcatcgagggtgccgatctggaagaagtggcaaagggtgcggctgacgtttctgccgtgtactcgggcaagagcgcatcttccctgctgagtatcgtgctggagcagatcaacgctcagatcaacttccttgctgtcgtcggtggcctgacccaggatcaattggacggcatggcattcaagagccacacttccacgaaggaacaggccaacgaagcttggatcaaggataccattgccagctgcgatagcctgcgccgctctgcctacctgttgtcttccatgttcggtgttgacattgctgccgatcagcaggccgtgtacgagtcgaacatgagcaagttcgacaccgaccgcagcgtggctgaggaaggcgtcggtcgctactggcgtaccgttggtgtcgaagtggaaatcttcccaaacaccatcaacgacgtggaatactttgtcctcaagtcggccagggatcagaagggcactgacggtaaggactaccccgctggcaagttcctcaagtccagcaacttcttcgagccgcgcttccagcccttgccggaagacgcacccatctttgaaatcctcgcttccaagtaatgaaggctgtactgactgtttccaacaattgcatcgcggataccctcaagctcgtcaaccgatgggctgagggtcatccaaagaaaccgaaagtcgagttgattggcttcggagaaaagctgcgtgacgcagacgtgctgttgctgcctgcttcttccatgctgtatagcgcacgggaaaagttggccaagatgaagtcggtggtgattgtgtttgacgcccccctccagtgcacgatgatccaaccagcaacgcatctggacattgagtatcagcgtcctagctacaagtgtgcgttccgtaagctgactcagggattggtcagtgaagaactggataaggcgttcggggcaaagtctgttgacattgagtgggagcggattgaagtcgctccgcgtttgatgaatcagcagcttaccagcatcctgaatccgatcatgacgttcctgcattctgtgcgtgatcctgacaacaggcagcactatcagaagctggtatacacatggttgttctctgacgctcccgtcagtgcgctacaatccaaggtcatggaagatggtaactacaagaaggttcctgccgcacttgccaagttggtcgaagctatgacgccaatggacaaggcacgcgaggcattccgcgaagtcctgagcaggacggaagcgggtaaggcggtgagctacaagaagttgagtgcgaagtacggagtggctgtgtttgacctccggtatacgatgagtgttgtccgcaaacttggcaagtatcatgtggttcaaaagacggtcaaagaactgtatgacacccgccagaaagagaagcggttgaaggaatgaaattttgcaatttcatcttgcccctctgagggcattcccaaactcatcggactactgaccatgaaagaaatctccattgaatcacttgaccatctggacgaagtggtcgccagcaacccgctggtgatcgccaagttcggtaaggacaactgccccggctgcaacgctctggatattaccttgcagaacatgcgtagcaaggcggagtacactgaggtggttgttgctaacgtcaagttggagaagatcggccgtgatgaattcatcactgtagcacgtgcagcccctaccactctgctgtatcggtatggggacgaagtgtaccgcctcaacagctttactggcgcggtgcctttcatcagtgcagttgaccagcatctgctgtccagctgtgaagcgtaagtgaattaaatccaactaatagaccaagggcgtacagggctgacacccaactacgtcggcggttgcaggtgaaccatgattaagacgattatcaagcgggacgggcgagtagaagattttagcccggagaagatcaatggatggggcgtgtgggcagcacaatccctaggcggttacgtagattggtccggcgtcgtgatgactgccgtggcgggtctgcctgaatactgcgatagtgagaagctgcaactggcgctcatccaagcctgtctggaccaagcggattgggcacacaatcgtatggcgggacgtctctacaccgcactgcgtcgcaagcaactgttcgatggcaaggttccgacctaccgcgaactgcaagagcgtatggctgaacacctcggtgatgtggtcgagcgttatgactacaccgatgctgattgggaaaagatcgagggcatgattgaccatgaccgagactttggctatgcgtacttccagacggatcatatccgcaggaagtattcgctgcgcgaccgtgttgcaggtaaggagtacgaaactccgcagttcacctttatgcgtatggcgagtgcgcttgcgcatgatgaacccaaggccactcgccttgagcacacccggaagtggtacgaccacttctcgtacaaccgcatcaacgctccgacccctaattgggtcaacctcggtacgtcgcatcgtggttacgcgtcgtgctgcttgtataccacgctggacacggagccctcattggaagtgggcgaccatatcgcgcgcgccatgacggcgcagagtgcaggcatcggcggcatcatccagagccggagcctgagcgacaaggtgcgtggtggtttgatcgagcatcagggtaagctgccctactacactgcactggctggcgctgtgaagtccagtttgcagaacggtcgcggtggtgcgtgcactacttacttctcggtctacgaccctgagattgaagtgctgattcgcctcaagcacccgcttaccccggaagagaaacagaaccttgacattgactacaacgtcatcttcaatcggttcttcgtgcgacaggccgcactgaataaacaggtgttcctgttcaacatcaagtcggctcctgatctgtgggaggcacagttccaaggcaacccgggactgttcgagtccttgtacgccaagtacgaggccgatgattcgttcgtcaagaagtacgtcagcgctcgcaagctggcggtgaatgtcatcaacgttggtctggagacgggtcgcctgtacctgttcaacagcgacgaggtgaacatccacactccgttcaacgactccatctacagcagcaacctgtgtgctgaaatcactgaaccgacctacggttacgagtcgatgcctgacctgtataccaatggcccggttggctacgtcgaactggaaatgaccaactgcgatctgacccttactgcacctagtaaggtcaaggtccgccgctcggtccgcaagtacgcacgtcacgaacaccccggcaagcttgtctcgtatcgggatgagaagggccaccttatcccggggccgttcattgaaagcattcaggacattttcattgccgcacaggaaatccaggatggcgacattattctggaggggcagacgcttgaaatgcgtatgcgggatgggcgcattgagcagcggacgtgggatgaaccgcagacggtctacaagattgtcaagctcaagaaggaaccggaagtcgcaatgtgctcgctggccgcgctgtgcgtgcacaacattcattcccaggaagagtacgaggacgctgcttactacgccctcaagatgatcgacaaggctatccacctgtcggatcacccgctgccccacgttgcatggagcagccgtcaacgcctgtccgctggtgttggcatgacgggtgttgcgtactacatggctcgcaagaagctcaagttcaactcgccggaaggcatgcgtgaactgcatcgactggccgagcgtcacatgtatgccctcatcaaggcttcgctgcgcctcggtaaggaactcggaaacgcaccgtggatgcaccgtaccaagtggcctcagggttggatgcccatcgacacctacaaccatcggatcgatgagtacgctgacttcccgctggaacaggattgggaaagcctgcgtgcagaagtgattgccaatggtggtattcgacactcggtcgtgtgcgcgcacatgcctgtggagagttcctcgaaggcttccggcggtcccaactcgctgtaccctgttcgtgggctcgacctgtccaagacggatcgcggttcagcacttgagtgggtggcaaacgatgacgtgaagctgcgtcgtcactaccagctggcgtgggatattcccatgtcggatatggtcaaggtgtacggcatcttccagaagttctgcgatcaggccatcagtgctgatatgtggctcaagctggaggcagacgcatccattacggatcgtgatctgctgcaacacatgattgatatgactcgctacggcatgaagactcggtactacttcaacagcatgacctccatcgttggtgacgacggcgaagttacgctggtcgaaaccgaaaaagagaacgcctgcaccagcggcgcgtgcgacgtttaaggagaacatgatgagtaccgaaatcaatcagtccgttgctggcagcaagattttcaatttctccaaagttgattacgcagagaagaccagtatcttcaaaggtcaggacgctggcctgttcgacacgctgcacaagaagcacccgaccctgcaaaagctgtttgtccacctgcgcagtatcgactggaaggaaacggagtttgagttccttccctgcaacgcagagttcaagcgttacccgcgtcgcctgtccaacatgatgaaggatacgctggcgtggcagtgggaagcggatagcgtcgcagccaagatggcgttcgcagtgctggcaccgttcatcacggactccaccgctgcacgtctgcttggccgcatcctcgacaacgaacacctgcatgctgctacctactcggagatcgtcaacttctcgttcgatgatcctaccgaagtgatgcagagcgtggtcgataacatggaagccatgcgccgcttgaccaccatcactaccgtgatggaagaaagctatgtggtcagccacaaggttgccctcggcatgatcgaccgcaactcggatgaggcttacgatgctgccatgatgtttatggccgcgatgctggcgatggaacgaattgcgttcatgagttcgttcgtcatcaccttcgcgtttggtaaggcgggcatgttcgtccccatcgctacggcggtgcagaagatttgtcaggatgagcatgaagtacatgtccagtttgacaagtacgtcatcaagcatgaactgtccctgccgtgtggtcaggctttcatgcagcgttgcgggcacaaggttcaggccctgctggacgaggcagtagaaagtgaaatgagttggatcgcctacactggcattgatgaagatccgatcgttggtgtcaacggtgacaacctgcgcagtcaggtgcgttactttgcgggcgatgcttacgcgacgtttggcctcaagcctgacttcgttgttccccgcaagatgccgatgccgtggctaatcaagtggctcaacatgggcaagactcagaaggcattgcaggaagagaagaacggccagtacaaggtcaacatgcttcgcttcgtgatgcccgaggacgaaatcatcgccgtagatttctaatggaaacccggccaaggatggccttcctgtaaatactatgcgagtacgtttggagagttgacgatggcgaagccattgaaggaacaggacacaccgaattcggttgcagcagaagtcatcatgcgcaatttgccgaaggtgcctgggcctaagaaatatcagagcaagggtacgatcaacatttggtgtccgttccacggtgacccgaatgaacgcatggtaggcaacccctccttcatgctcaaccttgctgctggcgaaagattccctgtcggatttggtcattgcttctcttgcggcaagactaagaactggaatgacattgcagcaaagtatggactagagagatatggcgaaggcgatgacgctgacatttgggcagtgaagccggacttcgacaagctcagtgatcgcatgttcgcggaagatgatggcgaatctcttgaccacctgtgtcctcaaatgcgaatccctttccacctcgggtggcagaagggtatcaagtggcgcggcatcaagtcgaagacgttgataagcatcggggcgcactatggtcttgacgaagagaccgaagatcaggcggtgatcctgccagtcaatgtgcagggagatttggtcggggcagtcaaggcgcggtggaagccgcaggacggcagccctagctatatcaacagccccggcaaatggacaaagcgtaagggcctgttcctgctggatgagtcgctggaactcggcgatggggcaacgatcattttgggagaaggtccacgcgatggcctgcggttgtaccaagatggtcttcccggcgtaagtattctaggcgtcaccaactggacgaagcagaagcgcgatctgctgatggaagctggggttgaacgtatcatcctgtgtatggatggtgacaaggctggtaacgaggcgatcaagaagatcaagcctgacctgatcgggtactttgacgtgtacgtgttcaacctcaacaagtggcgcaagaggttgaagtggaagaagatggacccaggcaacatgccagaggaagtcctagaacgcctgcgcaagatgtatgagcgggtatcagaaagtgatgagtgatacgaataaagggccttcgggccctttctttttgcccaaaataggggctccaacaagccactttggtgcaacgggagggcctgtagacgcaaggatttgagcccaaatttcagggtacgtggtaggggtgctgtcgagcaaacttggcagaaaattgccggattccgagcaaaagaaaaggcgcctaggcgccttttctcgtttctgggatttagtcgttcaggagggcagactcccaacgccacttcggatcggtcaggccgttgtggtaatcactcaacgccaagatgccaagatcagggcattcgactttgaggataccaccctcggggaacaccttgaccagttcgtagtgctcgttgttctccatgcaggccatgcggtaatagcccggcaccactggacagccaagggctgcgatacgatccctcaaagcgttctccttcttccggtgagcgacaaccattgcttcgagttcgtcatgcaacctacgcacttgctgttccaactcagcaacctgctcgtcgggtgacttgaccgtggggtcttgtcgtgtagcgccgcccatgcgtgcgatcagagccgaccatgtgttgtcaccaagcttgtagaagttggggtcaccactgtctttcaacgtgatcccatactcgatgaacggtgctgggtaggacgtgtaggaaaccacgttcggcccattgcatcccgccctaccaagcgtctgtgccactgtgcgatccttagtgggctggccacctacgaacaggatgacgcgaaggaagggaagccggaagccggtggccatgtccggatggacaagtacgatctgcttgcgcagtgctgcctcacggtctgccttggtggcagttgcacgcagcaagcctacgctaggagcccggcagtgagcaccttctagtggaccaacctcgttggaaatatggtgacgcagcgacgcagcaagctcctgtatgtaacgcccgtgcatgcggcacacaatcatcacttgagggttgtcgttccacgtccagaagttagtgccttcttcttcggcagccttggtcagcaggttgataatccgtgcggcctccctgcgcgaaagcaggccatccatattagagtcattcgggaacgcatagttacgatcatcgcggtagagcctgctcattcctttacctcatatccgtagtaggggctttcaacccacttgccattcttgtaccacccgtcctcttcaagctctgcgtaagcacgctcgggccctgcgatgaaggtgacactaccttcggagtagcctccatcaagcttgccccacaagcattcatgagtgatgccccgatcgttgtagatcgaacccttaaagaacaggggttggggtgagaggctgatccagtagagcggagttttgtcgcagtcgcgtccgcagtggacaacgaatgcgcgcacacccgaactcagttctaccaaggagccaagctcgatggcgtgctccagctttgagttgcgctcctttgaagtcagcccatcgtcgtcttcaatgtcagacacgttgatgagatagccaccaccttgaagtcgggatacaccttgagagcggacgcgcaagtcatcaccgagaacgacagtatgaggcttcgcgctcattcgtcttccccttcatccccgtcaacggtgtccgagcagtcgtcgcagacaccaaagttggtgtcgaactcagcttgcgtaatcggatcaccgcagtcggcgcagtgctcgttgtcatcaagctcgtcatccgtggagtagggatcgtccaagcaggcgtcgcacaatccggcctgatcttcgtagtccatcccgtctacttcgataccgcagctatcacatggcttgttcatggcgttcctcaattaacgtatgccgagttcccggcgggctttcttttccatccgcttctgcttacgctccaacgacatacgcgaaggaggtttggctttgcggggttcctctgaataggaagtgggtgcagcgacatgcgaggcaagagccaacgcaaccaaactacgctgcaacttgcgtgacaaggccattagcctcctcccgatgttgttccttccaatccgcgtaggcttgcaccacgcggtcgcgccactcggggcactgttcagggatcggcagtggatgagggccatgcagaccgaagatcacgatgcagccacaagcgttctcgtacacccacgcattctcatgctccatcgcaaactttgcatggccgtcggcaaagccatacttgccacacttgcagcggaagtcccacccgaactcatgtagggctttcttgcggcgcttcttgagcgccttcacttcgaggtgctcggtgtaggtggtgcgtagccatgctgcaagcttagagaatccgcgcatgctgttcctccccttcaatcagagtgcccaagtgctgatgcagcttggtcagagtttcagtcacgtcgttgtgcttgatggcgataccgcccgcctccacccatgccgcgcaattcttggtgtggtcatcaatcagcaagtccagcggcgcgtgcatcatgacgcatttggtactgccacccggcactggaataatcatcgtgtcagggcgcatggtcaccgaggcattcaaccaaccacgcttctggatagccgtcgggatgtagttcgacttggggcagccggtcaagaagtggtatggcgtgtggcgcagggcgtgcagcaagtcctgcgcgtggggcatcttgggcagggcaccgaagaagttctcgtggccacgaaccatcgcccacttttcgtcttcggtaatcgtgtcatggtggacaccaaagatcaaagggaatcccgtatcaaagtcagccatgacgccatccacgtcaacgtttatcagcggcatgcgaacccgccgcatccgagacaccacttgaatgcgatagttcacttcacgcatccactcttcccgaagattctgttcgtcatcatcgaaggcaccaaggccctcttcttcgagaacgttgcccatccagccgtggaactccggccagttcaagccacgattctcaaagctgaaactgtgcgaggtatcggtcagcgtgacttgccctagagcgtggccccgattctgcatcttctgcacaaccttcatggcctgccctacgtccaatggcagttccattacagaacccggagcggtttcgtacaggaacttcatttcgcatcctccttgcacacctgcgctcccttgatcttgaagctgacccaactccaacgcagatggacacgttgatagtccgggtcgttgcgctcacgcatggccttgaggacagtccgcagctgggccttgagcacgttgaggttggtcggggtttcgtacttggtggtcttgctgccagcgcactggtccggcgtaccgaagcgatcaccaaggaacaccacagggacgccatcaatggtgtggatgaacaccgtgtacgtggcgtagtcagggagagccttggccttgtttaccatcgggccctgcacacccaacaccgcgggacgacttgcgaggtccaccgacttgacgatggctgtgcgcaggctgtgcaacttgcgccacttgttctgcaagtgcggtagcgctatgccaccaaggccagcggctgtcttggaagcagtgatggccgtatcgagttccgcgatcttcttgttgagtgcagcgaacaccttggcaaggatcggaccttccacgcaccacattaggacactgccggaaccccgtcgtgcacgaggaatcgtacgcgtgtaggttttgggtttcggaacgagacgcttgaaccacgcctcattctctacgcagtgcagacgtgatgcgggtagatggtattcccggtgtgcgatttccttagccatattaggctccttgaatgttgatgatcccgttgtacttggtgggtacttgcatcggagcagcttgggttagcatgaaggggctgtgatgccgttgcttgccgtacttcgcttcgtggccgagtatctcagcgcgcacgcgcagaatattctccacgacagactccggcgtctttgcacgcagtagacgctctgcgctaggaccaaccggagagaactgaggtactacaggtgcgaaccttgcaacagattccaccgcagcctgcacccgaagcgcagcctcagcaggaggttcgcccctaccctcgggtagccgctccttcaaatccttccacgtctgcgagttgaccatgatgacgctatcgccgtgcatgcgatagaactgcccatccccaatcagcggcgtggtgccatgtttcttgagccacttcttgttgacccgaggggcgtaacaacgcccctcgtgccacttgcggggacgcacagctttcttgggcatgcgcgtgtcgttgatgacgatgcgtacaccaaagatggtttgctggagtgcgtcaatttgttgcaagggtcttccctcccatgtcttgtctgagacgttcgttgaacccactgcctccttcgggcagcttcaagaacaagccagcaaggttgcagtattcagtgacgttgcccgaggcaagcaactcgtccagcagcacgtcgttggtatggttgtaccctcgctgtgcaagccagttcgagaagtcggcatcgaacttgccagtaatcaagtcgatgtagtacaagcgcttacccgcatatcgctctcgcagttgcgacagggcgaaccccgtctctggagtatcgcgcacgatcatgttggggtgctcggtcttcaccaagtcgattttctgaatcacgttgcgatatacgatctgcccatcggtgtcgcgttcttcgtgcatcgccttccggctagccgtggtgtgatggtattgcaggttcgtacacgcgttggtgatggtccgcttcatgatgttgagcatgtgcttggcgttttcgatccgagggtaggtcttgtagactccctgaatcgcggaaaggactagctcatcaatcaactcatcacgctggctttgtcctgccgataccacgaacgccaagtccttaccgaccttgtacgctgcatacttcttggcatgcggcaggtttgacacaatggctcgttgaagcttaccccacgacaccggcaagtagccttggtcaaggaagccctcgaacacttcggataatgagtctcggcggcggacccatcgtttcagttttacgtcacgcacacgcaaatcgctttcagcgaaaacacgatcaaggttgcccttggcgtaggctcggaagaggaacgtcttggcttggtacatgcgtccggtactctgcaacgccatgcgatagtcaatgatgcgttccccagcaagcggtcgcattatcttggtgaactcactcacgttcattccgttgaacgcatagagcagcgtcgtctcgaccgctgcacacttgtccctcttgttgagggacaagtaagtctccggaaaatgcgtactcaatagttcagtgataatcatcccgaagtcccctccttagacttcgttcaggatgagtcgcccacctgcccccttcttgatgttcgatttcttcgccttgcgttccagcaattcctttgtttcgcgtacagacatttccgaccccttcttctttttcttcttgcgagaatggaagataatgccttcatcctcgatgccgcgttcaaaccattccttcggaaccgtatcgatggtgggcacgtcatcatcgataagggggcgtgctctccacgggcgttccagcagagcagcaatcgccttgcgagtctccttcggcatcttggtcttgccttccgcttccaagcgcgtccgacgcttgcggaagttcttgccgccgactacgtactccggcagcctaccgccctccttagcagtcagggaaatggtgtagggatcagccttgcccggttcacttggactgatatacacttcgatgctgtcgccatgattcacagcaccgatcacgtaccccttgtagtattggtcgatgtaatgcaggtcatacttttccatctgcgtccgaatctcacgcggcatgccgagcgtcggaggaagatagacatacagcggttgccccaaacgcaggccgactttctttagcggctcctgtcgcagcagggagtaagcgaggatgcgcagacttgcaccctccatcccttttgcagcattcgccagtgcagcaaacaactcggtactgccatccgcctgcttgatgcgcgtcaagtcaggggtgtagaacttgcaagccttcgcaaaaggcagaacgcccgtcttgctgcacttgtcagcatagtgcggactagccggtcctttgaaatgcaagcactcactgcacttgaggccaatggcgagcttgttggaatggactggcgtgactgccttagaattggtcggcatcgaaggtactcctaaagtcgtgataaataacgggcgtgcaactcatgtatcgcgtggaccaatgcttgttcctgattccggtatccccaatagtcgcgcaaatcctttagcttgtcgctggtatccttggtaaagttcgtgtggaacttgaccttcttgttaggatcattctcagtcaactcgcgcgcggctttaatgcgcccggcaaggtaaagcgcaacagagatagccctctttgctttggctacaggtagagcgcgaatgcgatcatcctcggccagcatcgtggggactactcttcccttgcctagctggtaactcagagtgtgcacaaggctatggtcaatagcgcacagcgaaacttgcggaccatccaccccaccataagcgcaggggatgatgtgatgcagttccaagctggactgagtgccacacacaaagcatggcccatcattgatatagcccggtgtcagtacaagctgtttactcatgttagcggaaagggaagccccaatcgttgaggacagcttcaccgatcagtcggttcatgcgattcaacagcgcgtgcggtacagcccagaaatacacgtaacccttgctcgaagcgacgcgacggcctgcacccagcaccaactcgtcgcccatgatcgagtaacgctcgttgctcttctgcccgacaatggcagcgatctgcttggcgtagtgggtcaggttggcaggcaggtcttcatgcttgaggttgataccgatcaccagctgattgcccagcacggtgtagaagcccgactgaccttcgatgcggaagcctgccttggcaagctgctcggtggtgaccacaccttcaaactgaggaacgatcggaaggtgacggatgatgaagggatcgtccttggccttggcgtccttgggtagagtggaagcgtacttgctggtcttgccgaacaggcgctcgttgacttgggtgccgtctggatcatgggcacgcatcgaagcctgctccttcttgagcgcgaagcgattcacggtggcgatggcttcgtccagcgaggcggtcagcatcgtcacgccttcctgcacgtccgacagttccacgtcacccgattccatgccatccatcagcgaggtggcgatgttgatgctggtgaccacgctggtcttacccgaagcgttcggcatcgccgacggtgcagccttggagaattgaccttcgaccgcgcgcaggctcgggaccatagatgccagcgcttgatggtgcaagctgcctgcgctaatcaggtcgccggccttcggcgcaggtacggcgtggcgcagggcgcttagggtggtagcgatttcttgcaaggtgctcattgtgcattacctttgttagagcgggccgaagacgattcgttcttgacgcggacttccgacagcggcactttaccaaagatggttttgccgcttggtgcaatcacttcaacggttagcccgttgagttggggacgcaggtggccacgcacaaagcgttcgacccacagcgaatttcgggaggcgttgggcagcgcctcgtatcgcttcacctgcgttttggcaggtgcgcgcacgatgatcttgatgccctcggcacggagcacttgacgctcaaactccaataccgagactagctcttccgacatgtaaacagttctccatttgtgcgcatccttttcgggccttgagaaacacgaaaaggcaggagggaccgaagtccctcccacctgttaccgaagattactcttcgtcttcttcgtcttcttcgtcttcttcgtcttcttcgtcttcttcgtcttcctcgtcttcttcgtcttcctcgtcttcctcgtcttcttcgtcttcttcgtcttcttcgtcttcttcgtcttcttcctcttcctcgtcttcgtcttcttcctcttcctcgtcttcttcctcttcctcttcctcgtcttcttcctcttcctcgtcttcttcctcttcctcgtcttcttcctcttcctcttcctcatccttcttggacttcttgccagcagccttcttgccacccttggccggcttctcttcttcctcctcgtcttcctcgtcctcttcctcagcgttcatcagctccgcgatctgctccttgatttcgtcgatctgcgcttgcagcgactccagagacagttccgacttcttgcccttacccttggcagcggccttcggcgcagccttggcagccttcttgccacccttggccggcttctcttcttcctcttcctcttcctcttcctcttcttcgtcttcttcctcttcttcgtcttcttcttcctcttcctcgtcttcgtactcttcgtcttcgtcgtcacccttcaccgacttcttgccacccttggccggcttcttggcagcggccttcttgccacccttggccggcttctcttcctcggcgtcaccgccaaaggtgtagatgccctcgtcggccagataggtcaggaagcccttgaggccatccttgctgttgatcggatccagcgtcggcagcagcttggcgatggcagcaccgttgctgtgcttcttcacgtcaatgtcgccgtcctcgtagatttccgaggcccacttgttatgagcgacagcgatggccttggcctgcttgtcggtcagcttcttggcttccttctggatgtccgcgatttgcaggccattgaagacggcgcggccagcagcggccttggtgtccttcttggcagcggccttggccggagcggacttgcccttacccttcgcagccggcttacccttgccgcccttacccttggccggagccttggcgctcgacttcttgctcacgaccttggccgtcttcttggtggtggccttggcgtccttcttcggagcagccttggctgcggtcttcttggcgaccggcttcttcgcagcagccttggtggtcttggcggcagccttcttggccggagcagccttggtggtcttggcagcagccttcttcacggccggcttcttggcggcagccttcggcgcagccttggtcttggtggccggagccttcttcgcagcggtcttcttcacggtggtcttttccgatttgcccttggcagcagccttggtcttggtggcggcggtcttggtggtcttcttggtggtagccatgtgaaacagtttccttataaggatgaatggttgggtagtacgtacatggttggccgttcggcgaactcgtccatgcccgaattcgctaaagtgtgcagcgccgtccggcctagctcgccgctgcatatcccttatttacaggattactcgccagcgtactttcgctggaacaggtacgcttcaacgtcgccgatggtcacccacttctcagcgtcctcatccgacacttcgatctggaaggtttcctccagttccatcagcagttcgatcaagtcgagcgaatctgccccgaggtcagagacaaggctggcggtggggagaacctcttccggcttgacgccgaggaactccactaccgcgtcggtcacccgcttatgcagggtggggtaaaggggactttgttcgatgctcataagtaccgtcctgtggatgtgtcagtatttacagtattgaggtggccggagccacctcaagttgccccaagtggggtcagtcgtccaagctctcgaagagatccgcgaggttggctcggctgaccacccggaccagctggtcctgctggatgagggcgttagtgaacaccggattgccttggcgattgcggcgcacttcgtacatgatcttgaagttgtcccaccggactgccctgccttgcgtcttgatgccccggtcagcctcgatcacaagggctcgcgtgttggcactgctgtccgtccacttgacctccaccacgcagcccggttgcacgtctacaaacttgaccccgatcggatagcccccgttgaccttcacgttgttcatcttgaaggccgtgttggagtggtgcacaatgtagtcagcgttgaagtgcttggtccggggcttgcgtacctcaaagtggtccgggtcatcaagcatgaagccaaccacgtctgccgcaatgtaggcagtgacgtaatccacgtcaggagccgactcgtccagtgtgccaacttggtggcagatgacgcctccgatccgaacctcgcggcgcgaatcaaggatgacggcaaaggaaccgtcgccttgaaggagggtgaacgcgtcccgcaggcgacggatgaccggcgtggtgtcatgaagcatttccttgccactccgcttccactccttgatgaacttctccgaaggggtcagcggagccttgggcagcttggcgaccgtggccgattgggtcggcatctgctccgggtgcagggtaaagacgacgaggaacgcgtagttggaggcgatcacttcgaccgccttgaccttctccttgcgacggcgcatgacgcgcaggaccgtcttacgcactgccgccttatccgtgatggtgtgggggaagaagatccgaatctcattctgcttgtgcagggtggtctgtcggacgcccttcaacggcaggtggaaagcctcgcacaggtcggacttgatgaaggtgtgattgaagccggtgattgcgttgctcatgtgtgatccttcattggtcggagtgttccgggaaatttgccaagtgtgcttggcgaatctggcgtagcgtgcaggcacagggcatgactctacaccactatcatacaccacccctagccgggtgtcaaaccacccctgtcagccgttcaggttccgttcaggttcgatttgggcacacttggcagaatctcttattccgcaatctccatttctaggcgttcctgccacgtcttcgggcggagggtcagggagtgtgaccagtggcctagcctcattcgtgccacctcgttagcaccacacccgtaaggcacaggcagcgagttgacccattggtggaatccctgggacgacttggctgacttgcctgccagctgccttgccgtgagattgattccggcgttgaatggcagtgggcaaatccgggtgcgattgatgtggtcaagtagcacagtcgcaggcattgtctcaacgcaattctggcatggtcggaatcctgtacccacgaactcttctggaatctgctccgtttcgcaccagccctccatgcgactgaatgcacgcacgcagcaactcggatagccaaaccacaagccaaacagaacgtactgagtagacaattccatttcggttcccctaggtagtggcctcagattgaggccaccattgtatcaatgtcagccacgatcttgtcggctggcttcttgagccacttatccagctgagtcaggaatgccttcgtctccttgatcttctccacaagcttctcggcttccagagccttcaagctgcgaatctgacgactcaggatcgtgtccacctgctcggccgtgatcttgaggcccttcatcaacacctcttcggtgttcttcgctttcagcgccttgacgatcaagtcgatgttcttgcatgccagcagcatcagttcctgcaacgccaactgctcttgcgtcttgcccttccgataattcagggccttgacctcaaggtcgatgcgccacttggtccacttcttgaagaagtccagcacgctggtctgcaacagttcagctgacggcgtttcggtctcgtagtcgaagctcttttcgatggcgttgattcggaagctgcatcgcttggagaagtgcttctcgatcacttcaagcgccttggcctcaaccatccgaacaccaatgtcctgcttgagaaccacttgaatcaggaaggggtctttccgactcgtctcatccgtacaggacttgacacgatcatcctcagcgactcgcccgatcagcttctccacgtcagtctgcggaggaatggacgtgatgttgatcgtcctattcttggcgtcgatggtgtagtccgaagtgacgatggcacggccagcaccagtggacagcagctggcgccactccttccggatttccttctgctcgttgctgcccttgttcagggtgcaggaagtggagccatgacgggcgtagttgatcttgagcgccttgctgcaatccttcacgtcgatgggctgcttccgaagggccttcttcgtcagttcgatgacgcccttcatgccaaaggcaggcacccaacccgccgtgcccaccgcgatgttgcccgaactaccattcaacagcaggttcggcagcagcgacgggaggatcattggctcttgatccttaccatcatagttcggcaccatgtccgaaacttcaaggtggtcggccgagaagaagacgttgtagccatacttactcaacttcaactcggtgtatcgcatcgccgcagcttcgtccgtcatcgaaccaaagttgccttggccgatgaagtacggttccgaagcattcaccatctgcaccaccgagccataggctgcggtgtcaccgtgcggatggtacttaccgatcacgtcaccaaccagtcgcgcagacttcttggtgccaccgctcggagccatgcccatcttgtacgccgcgtagaggatacggcgctgcacaggcagcagcccatcgcggtagtccgggaaggcacgatcctcaatgaccgcacggccataggtgaacatgcactcgtcgccatgggtggccaagtcaatatcgactaccacgttgttgcccgaagccttgaccttacccgacttcactttcttgcctttcactttcttggctaccttagccatcgttacgtgctcccaaatggctcatggcgagatacccgaatgggtatccctccgtctcgtgatacatgcaagccgcgttgactcggaactcgctgccatcagtgaaggtcagttggacagcctttagctcgccgtcctcccgaaactcttccgccttggcaatcgtcttgcctgccagcagtgcttgaatgtccatcacggaatccccagcaggcgttttctggcggtcacgtcgtcggccatcagcaacgtaaaccgggagagcgactttgcatccttgagcgtgatgcgcttgagcttacgggtggtggcatcgaacgctgcctcccgcagcatttccggagccgcctcaccccaccccttgaggtggttgaccttgttgcggtctgcgcccttcggcatcttggcccacagttccttacgcgacttcgccatgtaataggtcttggtcttggcgtcgtagtaggtatactcggggctgtccacggtgtagatcaggccacgctcgaacacacccggcacatacttgaccagcagggcgatcacaagcgtttcgatgtggcgaccgtcaacgtccgcgtcggtcagcataatcatcttgccagtacgcaggtggtcaagcggattcttcttggtcggatcgaagcccagcgcacgcaggatgaacaacacttcgtcactgttgaaggccgcgttaatgtccttctgcttcatgacattcaaaatcttgccgcgcaacggcaggatttcctgatgcgtcttatcgcgggccttcttcgccgtgccgcctgccgagtcaccttccaccaagaacgtctcacgcttatgcggagcgcagttggcgctgacgaacttggcaggcatgttgttgcccttcttcttgcccgagttcagcgcagcgatggccttctttgaggcagtgaactccgccttagccccacgcacagccgctgccttctcgcacagcgtcttggccagagtcttgttttgtgcgaagaattcatccagcttcttctgcaacggcgtgggcagcatgtcgttgacccggccgtcaaccagctgtgccttgtcctgactgctgaatcggggagcatcgagtttggcgttgatgatgcctactgcaccttcgagcacgtcgtcctttcggaaggactgcttgctgttggcgtacttgacgatggcattgtagagacactgtttcagaatgtctacatgcagaccgccattcttgttgtggatcgagttggtgtatgcctcgatgttgtcgccttcggcatctgtgaacgccagcgcaatctcagcagggaaccccttctcggtcaggacgaacggcttgccagtgacagtagccttgagcttcttgcactgcgcaccgaggaagtccttgacaccatccttgaacttccactgcttcttcttgccatcaacgatgagcgtgacttccagcccggcgttgaggtaagcagcaagttcacaccactgctcgaagtagtcgatcggaatcttcgagcccttgtcgaaatacttgaggtccggaatccagtggatcgccgtgcccttcttgaccttgaccccgaacggcaacttgggggcagtcgccttcttgaccggcttcttctccacgccatcggcgtactgagtatgccaccacaccttgtctcggaaggtgtgaacctcaaagtgcttcgacagcgcattggtagccttgaggccaacgccgtgcgtaccacccgcgttctcgtaagcacccttgtcaaactttgcgcctgcatgcagacgactgaccagcgacttgagtgccgactccttgaccttgcggccttcgatttccagcgtgtgaggcttgactggcataccacctgccgagtcaatggtccagaatttccacgccttcgtgtcgatcaacagggtgacagaagcgccacggcctgccttgaattcgtcaacgatgttgtccagcggctcgcggccgatggtgccgatacccgttgaatctgtaaggccgatatacataccggctttggcctgaacggctttcaagccaatcaggacttttacttgcttctctgaatagctggctttcgccacgtcggttcctcttggttgaacgtcataccctatatttacaggatgcctcaatgtgcagaaagccctgcgatttctcacagggctctccggtcttactccgctgcgctcccctgctggcgacgcagccactcctgccgttccacgattacgggatgcaccatatccccttccacaagttcgtagatatggtacacccacaccgcgtcgatggccttgccatccgaacggttctccgccgtctcgtcatagagatactcgaactgcggttcacgtgtaccaaggtacgcgccccacttgtgccagcgccaaccaccattcggctcctgctcgtccctgcgcatttcaaccatgctgacgcagaagtaccgattctccagagcgtcgatgatggggaacagttcaaacagctgttccggggtgtccaccacaccatagcagttgaggtagcgcctcttcggttctccgtcctctcccacgttgtcgtagatgcctgcgttgtgctcagggaactccggatagtcaagatcgaacttgcgcttgccgtcctgcttggagcggttgatttcatgatcgaagttgaggtcgcccgtgaacacacccggcagcgttgcgtgctcgtacacgaatggggcacggtaggaaccatcctccagcttctggaactgatccagatgctcatggaaactttcgttgtggggattggcaccgatggggtactggtcgcgcagaccctgcaaccattcggcggtataggtgatgagcttcggagtaacgagcatttcaattcctttatcgtagttgtgcagtgtgctcaatgcgttcacgcagcttgtcggtgtcgaacgtctgctccatcagcagcttgttgacccaaagctggtactctgtccgaccgtctacgtcacgcttcttgatgacgtagttcttgccgttgtgcggcgccacctgttcggtgacaatctcccatgttactcctgccatgttacgctgtgcattccccattcttcacccacgcttgtcaccaccgtgttaggtgtcgggcggcccatgacgaaattcatgaactgccagatcatctgtgacgcgacaatctgcgccgtagctccgacactgagggttgccccacaagccgcgcgctctacattggcgtcgtcgtcatcgaacaggccaccaatgtaattagtgcgttgccattccttgctgcgatcaagcaggaacgagattgcatcccgggctcccatgcgtccatccagaaacgcaccaccctcacacggcaagtagttctccgcgaaggcacggcgcgatgccatgttgtccacgcatacgaacacgtatggagtggcctcaaacctgggcttattgaggcggcgaggacacgcgcccactcgcgtgtccgaaacttgacgcaggcgatccaccaaggcaacagccttgttcgcccccacgtcatcgggaccgtacaggcattggttcggcaggttgtgggattccaccacgtcatcatcatagacaacgaacggtacaccgatcttcgacaactgcaacgctaccgcgctgcccaaggctcctgccccgacaaccaccgcaggcgtgcgctcagtggccttacttttgctcaggtcgaagataccggtcaatcgaatttgatccatcgttagtgctccttaaagttcgtcatcctcaatatcatcgtcgcactcgcaatcttctggagtgcacaagcagcggttgcaacacttgcagggagaggactcacagtccgagcagcaactgcaccgagtacgcttgcacgtaccacaacagccacattcttcgctcggctcatgtttgcaacatacgcacttgtgttgcagcatgttacagccggggcaactttcgttgctgatgttgttcaacttgaaataaccttcggttacatggaccaactcttcaagcctcagcactgtctcccgagtaacaggaatcctgtgccagtctagttccgcattggacacctgtgcaacgatgttgtcgaacttcggattgctagtctgactcttcaacgcaagcaacttcgagcctgatgctcccatgttttgatgggaacccttcgacctcctgcgtgtaccaattggtgacagggagggcgccatgtttccgatgaggtctttccacggagaaaccgccgtgtactcagcgtcgggcttatctccatacgtcttggcccatgccctcacgtacagatcgttgcgatccggcgtagccaagaagtcgtaaagcagctgcaacctgtaacgcaagttacctacaaccgaattggaagcggtggaaatgtggtcctccaactcgctatggaacgaacctaagcacagggagccatgcgactcttggctgctcgggacagccatgtgtggatggatgcgcatacgcagccggggctcagagtattccaattcgtaggcaagcggtgttgcaatgttgcgaatggcgaggtcggtattgactagagacagtgcaatctgatactgaccaatgtagaactggcttggcaccgcccggttatccgtttcgtcctcatcgtcaaagcctgacacttccggcggctggtagtacaggtcattcgtttggacgatgaccgtgcccgagggcagcaactccacatgctcaatccacgtgtagctattgagttctgccagtgcgaggttcacgtcctccgcagtgaaagaacagatgcgacgaatctgctcctgcaactcggccttacgtgcacgcaaagtcagcagcgactttgtggtttccgtcaagtctcgttccacgtcctcgtaatcatgcaggagcgccgtcgcccgcttaatctgaatcccggtaaccaaggaatcctgagtggatacaacgtccgtagtcagcgagttaagcagggcgtgatacgtgagggcaggagaagccgacaggaagatgttacctacccgcaccaccgtaggtgcggtgcccttacggaagcgttcccacttcaccacgcggctggggaagtcacgcgcctcggggtagcccgatatgtaaccaaggaagcgatcctcgtaggggtctaacgcagagtcgaagacttccgcgatggccttccatccaaggttgaccagcatggattcagccttggctttcgtttcagcggtgacattgaagtggatgccctcgatgtgagcgggtccatacagcctgtactgcgtaggctctgtcacttggaagccgaacgtcctgcgcactgctatgcgacgctcctgctctttacgatcggcctcaaactcgcgctggctgcgccctgtgtcgaagctgaggcgttccatccagttgatgagttgtgtctcgttctccatagcctccagaggaatgaccagcggcatgcgtccgacgcacgccatcgcgtacatgtggacctgatcctccttcatcattacctgttcgacgctaaaatgaatttggcttgttgcagcccgccgactgaacacgtcgtttgccacggcgctttgcagattgcggaagtcaatctcgtacagtggaatggagtctgtgttgccattcacgaacgcctgctcacgggtggacttgtagttgtccggatcatcgtcgcgggcacgatcttgggacagcaggatgaagaagaacgcccacacatggtacacgtcagggaacgtgttggaatccatcaaatcccacttgcaatcttgcacagggaatacgtcgttaccgaagcactgctcagtcatggctcgggcggctacgccaaggtcgttcgtgacgtgacctgtactgaactcagttaccgagttgtattcgtgtgcgttggaaccggacatgtaggcagagcgcaccgtgttaggcatgatgcgctcgtggcctgctgcttcctttgcaatcacccaagagctaggaatgacagcaggctggttgaatgctgggtatagatcaggggagtccttgaggtaggcagccactgttggcacagccatcccgaggtacttgtagaatatctcctgcatttcaggagagcggcgattacggaacagagtcgccatgttctcccgcagggagtccacgatgaaaagaatgcaggcgcgaagcgtggcagtatcctgaaccttgatgtagggcctttctagcaaaggcacgtcttcggccgctacgtcaagagagacacccttgcagcaatctcggcaccgaacgttctcagagtacctgttctcggtgtcgtggcactcgcagtcacaatcggaggtgcagcacatgcactcgtcatcatcgcagtagtcccacaactgaacaaccttctgcttcgctgctgctttggggaaccttccgttactcatcatcgtcgccttttcggtagtcctgaatgtacgaaaggcccgagcgtctttcgacgcccgagcctaggtggtacgtgtagctttagccgccgctcgccttggcgatagcggtcagcttgaggttttccgacagcttgcggtcaagcgcaaccggcttacccttgtcgtcctgatacttgaagttctcgtagccagtaccgccgccagccttgatggccgaacgcacggtcgagcctgcggtggcggagccggtgacggtcagcttgccagtgacctgcacggtgtaggtggcgactgccacttccgccgccggaacgtccgtcacttccgtggtcggactggcagctgcggtagcttctgcctgaccttcactacctgctgccgggacactgacgtttccatcagtcgcggtgctggtttccgaattggttccaacggtgacactaccttcggcagcgacgttggtggcttcttcgttgttctggacgttcttttcattggtgttcatcgtttcgattccttgagatacagggattggttactgcctgacgtagcagggaggatcattcctccctgcgagattactgccgaacttacttgaccttcttcttgcccttcttgcccttcttcttctcgcccttctccggcttctcagccttgccgcccttcgacttcttcttggcagcctcttcggcctcacccacgaacgaaacgttcgtgttggcgacgacgtaggtatcaccgttctcggccacgaacgtggtgaagttgcccttcacttcgatggtgtccggcgccaccttgatgttggccagttccgcacgcggattcacgaccgcgatttccaccgaaccgtcttcaccaacagcggcgtactgcacgttggtgcgcgggatgacagcctgctcgaacttggacgaacgcgggcgcttgtagtggacggtgatctgattcgcgtcttccgcgaccacggtgccttcgatggtgcggatggccggcccgtacagggtggcggtataaatctgcttcgacattgtgatacctcagaggttgggttggatcaattggaggaacgaatgagttccaagaaacgccggttgacgaggccctgcatggtttcgtcaaaggtggcgagcttgcggcgaatcttgaggtcttgctcaagatcaccccgacgcgttgcctcaaacaaggcgagcgccgtttcttcgatgggcaggccccgaaccagtcgcgtcgtgcgcgctgggcagttcttgttgccactcatgtagtggcattccttgtacgccttgagttgctccgaacgcttctgatcggtactcaccaagtgggtgcacttgaagcaccacggcttgtccatgatgagaaggttcttggccgagtcgtcaatctcgatggggacttcatcaacgtcgtcgtcctccgggatgacttgggaggtgaaggaaggcgtagcgccgaccacctcgacaggaatctcccgaccagtaactcgcggcttgaccggcagaacgacttcggtaccttcatcctcgtattcgtccgcgtccgcactggagacttccgcagccttgcgcagctgcttgtccactagcgcctcagtcagcgctaccgtgattgcggaatcatgcagtgccttggcagcgggttccgccttgcgctttttgagtcgaggacgatcttcctgggttgctgccttggttgatgccttggtctttgccatgttcattcacctgtcttcgtggaggggcacgtcccctccgatttctgtagcgaagactcactcgtcttcgtattcgtcttcatcttcgtcatgctcttccacttccacttcttgttcggattcttcttcgtcttcttcatcctcttcgtcgtcttcatcgtcatcgtcatatacaggcggcaacggctttgcgggcttcactaccttctgtactggcttggtagggaagggaggcgcatcatcttcttcctcgtcctcggtatcgtcctcttcctcaacaggaggtgcaggcggcgctaccttcttcttgcgtaccggacgttcttcctcttcatcctcatcctcttcctcgcggcgcttcttgtacgtccgctcgggaatatcttccgcactacgaatctgcacaacactggtgatgctaggatggcacaaatgaattgtaccgtcttcttcatcagtcagtacgtacatgccaccctggacttcaaagtcgctgacctcaaacacgtcatactcatggttcgggtcatcaatcagcagggttgcctggggttcgttgatgtagaacgctgccttgactgctgacagcggataggtcacgtcttcaaacttgccacgggaccgatggatgcggcgacgcagggtaatgtgaacgtcactacggctaatcacctcaccgtagacttcaacgattcccggatgctgaatggttacagtaaagggaatcttcttgaccggcttcttgtgggcctttgccttttccaactttttcttggtcttgaccttttccggcacagccttcttggtcttggtaggcgcaggcttggttttgctcatttagtacctcggacggggatggctaacttgcttatcctttatttacagtatcgccctagcgctcaaattcaaggctgtagcggctgatgatgtgctccggcaccctgctggcgctggccttgtggagcgcccgaatcttctccgcgtccacattgaagggatcgccgacgatccgttcttcgatgtagtaatagtagaacccggcggaggtggcgtagtggtaaaagtgcgaccggcgcacgttcggattgaccaagatgaccacctcagtcccgagcatgaagtgcatacaagcgcgctcgtagttgcggcgatgcgcattctgcaactcgtacccgttgaacttgtagcgccccttgtcatccttgaggaagtcctcggaggacaggatggccacggttttgactccattcgccagcgcagttgccgcaatttcctgggcggcttcgtccagtggctcacccggtaggccccgcaggatgtagaacgcacacttgatgttgttgggatgttgctgagcccgggtgggactcagcgttacaccttggcgcttagggggattgggataatccccgacgccgatagactggttggtgtccatgacggttagcctttcacagaattgtagaatttcaggaacttagggtagccggccacgaacaggtcaatgctttcttcgccaaggccgtccacggcggacagtgccttccgaagtgccttgggcttcgcgccgtagctatacagcttctttccgagggcatcgtacaccaaactcagcttggcatctgccatcgacatacccggacggatgaaagcgccgctaaccaccatccagtccacagcgttgaatttcgcaaccttggcggagatcgacttgtgcacctttgcgcccgccgcgttacccaacagcttttgcagcttcggagcgcttgctgcgatcagcttggcaaaggtgttcaggcccgcatcgtacaccttgaccatacctacaccgcccatgccgtcaaagttgacaaacttgagcgccttctcgaaccgagcacgcagcgtctcagcgcatgtgtccggtttggaacagtacaggtgcgcgtcgcccatcttgagcttggcaccacaagaacacacagcaggcagtcctgccttcttgcccggcttgatgacttccaccacatgaggaatgacaccaccgctgcgcaccaccttgatcttggccccgaggttgaggttcagagccatgacgttcttggcattgtgtgccgaagcattcgtcatcgtggtattgccaaccttgatgggcgcgtatgaaacgttggggatacgagcaccatctgcgcctgccgtccagaagaactccgtgacttgagtgatctgtgcggtggcgtcttcggttacgccatacttgtacgccatagcgtagtaggggcgcttgtcaggaccacgctggtcacgcagagcgcctcgcaccgaagccttgttcgcctcgatcaccacgccgtcgcactcgatcatgtagtccggagagctaaccttggcgagcattgcatccagcgtgggcttgatcttgtcacccgacaccagcttgaccgtcttggcgaacatatccgagaagccttgatcggcgagccacttgaccgccgccagcttggtgtccattaccgcattgccgttcgcgtccatcagttcaaacgcgaccaccgagcaatccttcacgaacgcatcatggaagcgagtgccagtcaggatgccgttgaccgagttgcgcgcttcgccataggtgcgtccatccaccttcttgcccgaccacttcttgaacgccttgcgggtgatgcacagttcgcagcgaacgtagatgggcgagttcggattggtgcccttgatcttggcgaccttggcaggcacaacaccgagttcgatcatcttgcgcagatgcttggtgacgttgcgccctacgctaccactaccgcgcgtgtaggctgcaaccggaatctgattcacgatcttgatgaggaaagaagtgccatcgaacttcggtcccaccacgtattgcttcgcaccgaccttggccgtgcgttcgatgtacttgtcgaaccacttgggttcgtcggtcttgagcttgtcgagcgacggcaggtagaagggaagattgactttctcacccccggtctccttcgcgccagtgcccgccagatacttcttgaccgctgctgcgagcttcttgtcaccgaccttggctttttccaaggcgtcgcgcagcttgtcgtattcagcatccgccatgatgggcttgaccttcttcccgtcggcgttgaagtaagcggtgtccgctttctgcaacaggttcagggtcttctttgcgtcaaaaggtttcttgaacatgaataagtcctcggtgtgtttcaattgaaataagtgttgatgcttcgcagccacaccacaaaggcaggcaagcctgcattgcctttgaagtgcccgaacatcattcccgtcttggtacgaatctgaattcgtggctcaacgtatttgaaattgacgcctgacacattgagcttacggaagtggtacttcctgtggagtcgccagaaacgttgacgtacctcccgaagggttccgttcaaagagacgttgactagcttgccgttacgtccccgaatttttaccgccccttcaacggtggctcccttgagcatcttccgaaggtgatccataaacgttcccttgaacctaagaaagcgagccccgaagggctcgcatcatgtttacttgccgccgtgcaaacgcagttcgcgcttgctcatgacgcaggagtgcatcgcattcggatagcgctgcttgctcgcgctgctccacttgatgccacactggttgccttccacgtaggcaacccgcccggtgatgatcttgcccttgtaaccaccttcgcgcgccgccgggccgttggcagcgaacgacaccttgctcccgaccttgatgccagtgcgcttggcgtcgtacacgatcttggggccgggccccttggacacgtacactgcacccttcttcggctccggcttctggaaggtgccgctcttgaccttgcgctccaggttctctgcccactcgcgcacgtactccgcattcaccgcttcaaggaacgcgaccatgtggtaggtgtcgatgccgaaggtgcggccgagctttgcaatctcgttgcgcagttccttctcgcggaggtccatgttgccagtccacatttcctcgctgtacttggactcaagcagttccggcgtgcacagcaagccaccttccacgaaatactggaacgacagcaccggacgggctgccacgttctcctcaccttgcttcacctgaacctcggtgaagaacaccgtcaggatgccattctcgtaggaggtgctgaggccgaccttgcgtgcggtcgaactgatgatgccgaagatgacgttggcgagagcgttgaaggtgctggagttaatgtctttcatgatggcttccttgattcaatagatgcccgaaggcgtgagatttcaaagtgtgtttggtatgccataagcgacaggcacactcccacacccctatcataacacaagtcaagtcgggtgactaccactcctgactttcgttcagctgccgttcaggttccgagggtggtcatttcgagcatcctttgaaaaatcgaggggtcggtgttctgacccctcacgtgttactgcgctacctgccgcacctcaatcccgaggtggtggcacgtcaagatgatttgatccaccgtcatctgagtggacgcaactaccttgacacctacttcacgcgctgccttttggaagatggcgaaaggcactcggatgttctccgcagccttggacgccgcagcaggctccagccgtaccggctttagagtcgctttctcaaacgcctgaccaatcatgtagagtgtggtcaaggtgtggagagacgacagcttgctggttcctacatggtgctgctttggcttaggctgcggctttggtgcctccggtaccttacggccagtgagggcagccaactgctctgccattgacaggctcatgccttacctcgcttcttgttcttccgacgttcgatggccttccacgctcgacgctctgcacgattgccattcggattaggaccaccatcaaagcagggctctatcaccatgtcatcgtactcatgcttacggatagcttccatcagccccttggtgttaatgggttgatcgtgaagcaactggatacgcggatcgtccagaggcagcaccatatcgccgatcacgtccggatgttccagcagcgcatccgctactcgtacatccgtggcaatgaggttcagcacactaccgagtgtgtacatgctcattgtgcgcgccatgcgtgacttgccaccacgcatcacctcaagatcgggagccgcttccatcatctgccgcttgattacctcaagcgtttccacgtcgatttctcggtcgcgctcgatcattcttcatggccggtgaggatttgggccaacaactccgtgggaacgttgacgaactgcgcaccatctacgtggtagaactggaagccgatcaccttgtcgtctgccttcataccagtggtgccccggtagacgatgaactctccgcgacgcaggacaacctgatcggatgacccacgagtggacagggtgacggtggtgtcttccacaacctgatagacagcatccttgatgaggacaggagacagaacgttggttcggatagagtacatggagacttccttagatcaggggaacggtggcggtgacgctggccggcttcttggtggatttcttggcacccttcttgccgtagggcttacccatcgtagcaggtgcagcttccttgcgcttgtcggccttcggcttcgtcgccttgctggcttgcttgagcaacttcttttcggccttggccttcttggccatcgacttcttgtgggccttctcgcgcttgtcctgctccttctcgaaggcttcgatgtacttggactgccggacttcgatcagggacttgtgctccttgaagcgggtaagcagttcgaggtcacccgaactatagacgccgatcttctccagcttcttgtacgccttgagtgcagacttcggaacattggcccacggaatcgagacggcgatgatgccactcaacggcagcacccgataggacgcggcctgacgtgcgaagtaggggaagccgaagctgacgcccagctgcttctccagcgacttgcttttgcccttggtcttcggggcgacttccttggacagggcggtcagggcggtcagcagggcctcaccttccggcgaagtcttgtccttgcgcagctggtacaccgtatcacgaacacccttgacgcgcaccagcgcaagatcacgcacggagttggtcaggcggaagcgcaggttgctcggtacagcctcgcccgagaggctcatgcctgccacgtgctgaccgaagctggaatccttcaccagcttgtaggcgcccttcatgaagtcctgctgggccttgtggaccgccagcatgttcttgagcacgtcgcccgacttgatgaggaagtagcgcgtgtgaatgtcgccattgtgcatatcgacttcggcctcacgcacttgctggatcagtgcctcctgctggtcgttggacaggtagtgcttgagcttgaccggcttggtgtccgtggcggtggtatcgttcatgatgattcctttgtaatgatgggagggttggttacttgaccgcgtacagcggcttcggggtgacgaggttgcggaactcttggccgatgttgcttgccttgatggggtggcgactggacgcacgcgatgcgaacgcccggatcgcagtctcgtaatcagtgagggcgaagtattcgagttggtgcacggtggccccgagcgtttcctcatcgtacttggtcacctcgtagtagcccacgctgataaggtgggccggctcaaaaccttggaagtggaccgggccatcgtagtggatgccaatgtagtcaagggaggtgcgcgcggcactcggttccgtcaggtccactttgtccatgtaggcacggccctcaatgccagttacctgacggccctcctcgatagccttgatattcaaggcaccgaaagcatgcacaagaatgtcggtggtccctgcttccacgttggctagcaggaggcgattggggaattcaattaggtccggatcacgcttcatcttctgcctcgttcttgtcaaagaaagcttccgtaggggtcttgccgtgcttgatgcaccagtccatcagcaggtccagcccggtcacgtcgcggcgtgggtcgttgagccgcagttcgtccatttcggtcacgtcgtgttcgtgcagcacgtggtaacgaacgtgatccatcttgaagaacttctggaacgcctcccaacgatcagcgacctgttgcacttgagccagtcgctgctcaaggttcttgatgcggtcagcttgattgttgaggtcatgcgccaaatagttcgccgacacttccccgatgatgtggatgcgcgactgcttcccatcaggtgtggtcagggtcatgatcggaatttcatggtgcttttctttggtgtccagataccaccagcgtccttgtctactcatcgtctcttctccagtgaaatgccttcgcgctcagagacgcgaattgtgtcccgtcctacccgttgggcaagggatgacgagcacctgtaggtcatggtgccccgtaccttcgggctgattgtggctacgcctatcgcgcgctccacgctccagccccgacgcagacgcatgtaaagcgtcatgtacttgatccctgtttcctccgccagttgccgaagggttatctttctcccttgatactctacgcacacctgcatgttcggatcgtactctgacttgagcccctgtttgcagccgcaactgcgaacgtcgccggacctcaagttggttgtggtaacgatcttgtagatgccgcagtcacacaggcaccgccatttcgttccaccgcaacgctctaggacttccagcatcccgaaacgttgcccttccagattcagcatgtttgacatggtgacttcctaggaatgatgctgcctgtagacctgcatgacactttcggggaggccatgacctgttgcgcggacgtaaatcatatcacgcgtgcaggtgtcacccatgccccactggtggatttcggccagttcgtcgtcaggcagtgacgccaagaacgcatcgaccacggctgcattcaagaaaccgttcggctcgatccccgaatagtcgaggatgttgatgagcagatcgtgggccgagtccaattcatgcttgtctgccttgaccttcgcaatgatcgcttcgttgattgccttgttgctcacagctttctcccgagtgcctgaataatctcaggtggtgcgtttggatcgatgtaggtgtaaccggccttgttgcagatgggtgcgatacgcattttcttgcgttcgatttcctcacgcgctgccttttcacgcgcagcccactccggagtcacctcacgtaccacgtgcttgaccgtgctaggagcacgcatcgtcgctgagggacccgaggcggctttctgcataccttcggtgatgacgtacttactttcacgtggcttcaactcagtgaactgtttcttcggtctcttcttcgcagtgttagcctcaatctctgcctcacgctttgcagcgttctcggctcgcttgatcgcccacagtttcttcttacgctgacctgttgccattacgaggtacgcccaacgtaaatgtccttgtcgctgccaatcagcagactctgacccggctgcaaatcggcgatggcgtcgaactcttcatcgctgtagtccgtcatgttgaacacctgctgcaacgtgaggtcgttgcgcgtggtgctttcagcagccgagggttccgaacgatcctgcatggtgaaacggcgcattagactttctccttcttgaagtagttgcggagggtttcctcatagtagaacatgaggtcccgatttcgtttgagatcatcctgcacacctgcaccacgccccggatacttgcgcagacgctcaacttcgcgggtggccttgggaaggttcaagtaggccacgcgtgcctgctcaaacgacggctcactcggagccgtcaccaaatcgtcgtcgtcgaaatccatcacgaaccccgactggcttctcgctcccacgcatcagcctcacgcggggtcatgtgggcatccagcgggaagtcttcggctgtgtcttcctcacgctggcgcttctcttcttcgtagatgcgaaccgactcagtgaactgagcatcctgttcgcgttcttcttcgcgcgaccacagttcccgatcacgttccagctgatcgtagttcggttcatccagcgtttcgccgaggccgtcaaccccatcgtactggcggtcgaggtcttccgcccagtccgacattgaatcgttgtactcctgctcccgcctacgttcctcgaagcggtagttgatgtagttgctggacagcagacgacggaggatgctttccatcgcactccgcgatgaagtgcagaagacgaaaccgctatggccacgcatgctgtcgaaatagtgcagcttgccttgggtgtagtcgatggtacccgacggggaatcgtactcgatgttcgattccaactggcgcagtgaacgctgcactgccctcgggccaccgagcctaccagcagtagcctgatagtggatgctcaccgaagtggcgcgtcgtccacgctctgcccacatgtacccgattgactgcaatggcatcatgagcttcggggtagccttcttgaacggcggcgcgtcttccttgttttcgtgcatcatgccgtgcacgatcttgctggtttcttccagcttctcgtaccacttcttgctacgccaaccgaactgattcatgggacgaaccggaccgaggacgatcatgtgatcgacactgatgccgtcctccatgatgactgcacggaacaggtgatcgccaaggcgcaacttgcgcagtgccttgtccgacaaggaaggtatatcgaaccccgtcttgtcgtagccccagccgtgattccaacggtcacgctggcaaatcacgcgatgcttcggcgaggtgttgctcttgcgggtacggtagttggtggtcatcgtcatcgtctcgtctaggttatttacagaaggtgattactggttgacttggtacttgtggttgcacttgacgcagccgtgttcccacatgccccacgcgttgaacttgccttgcccgaacaccatgccacctgcctgccacgaatgggcaccgatgcagtggcgatggtccagttccttgttgtggtccagcaccactggcgcgatgatgacaggattgtcaccgaaggtctgcttcgcgtcgaggccagtaaggccaccgccttcaaactcggcgcggatggcagtcacgatgttttcgcgggtttcgttagcggccgatgccgcaatctgcgccgccagcgtctcaatctcgctaacgctcaggccgctgaactgtaggatttcacccgagccccactccacggtgcagccgttgcgtgccttgcactttatccactcacgtaccacaccgaggaaatcaccaccacgctccatatacaatgtcagggcgtttgctgccttgccggtcatcacttcttcatggttcaagatcatcgtcttgtcctcggatcagtaggtagttgtcaggaggcgtttcaataacttgttgtcacgttccgggttgcttttcaggtcgagcgaaacagattcgccgtatgcacagggttcaccgtctgcattgagccgcacgaatccaccactttcgggcttatgtccaacgaacgcgctggccatacgatcatgctccatgtactccgggaagatgatcgctccaagcaccgatccgtacttggcattcaattcgcccacaagatatttcattaccgcaggcctccgatgaactcattgtagggaacaaccacgttctctactgccgggtggtaagcagggttgacgcgaatctcgttcttgaagaacggatacgaacacgtcatgaagacgtagcgttcaagggtgatggcaggtgcacccttggttgagtccggcttccatttgccctgtgccacctgcccggccagtcgcggatactggcgtgcgatgcaggaggaaatgcccgccaccttggggccgttgggatcatcgaaggcacccgtctcgatccagtccacttccacctgcgcgaacgttgcagcattgtcgcccgtggtcaggttgccactacgcgcccacatgctcgcacgatcttcctgggagtacgaggtggcggaggctacggcggagaaagcgagcagcgcaataccgatcagcattttcatcagtaggttacctgtcgagcgatgagggtagcagcgcgttcaccgatacccggatgaatcggcatgccttgcatgaggtggtcgatggcctgtccgatgacccagcggccatgcaggcgttcggggagtcgctcaccagcgtcgatctgctcgcgggtcagtacgctgtcgttgcgcacgtaaccttccgcgatcaggaggttcgcaaccaattcatgatcgaagtgcaggcgtatgttgtcgttgatggcagcgaagtcactgatccactggagcaaatcactctcgtagccgtcggctgggaatatttggatcaggcggtcaatctgggcttggtcaatctgcgcaagtttgaccctcacagcttccgcctgcttgtacgcatccgtttccctgtactcccgggtacgttcttcgcacagttcgtggaacctgctttcccatttggtgacggcaggggagggccggtggttgatgatgtgctctgcctcgtcacgcgtcaggcggacttcaacgtcaatgccattggcgcgcacgttgagcttgctttcccacccgaacatctgctgcatgatcaccagcatgttctcgcacttggcgagtacggtgggaatgtgtgcgcccggttcctcaatggtggtgaggaacaacgtggcatcacggtcgctctggaccaactcgccgattacgccagcgaggccgctcaggtgagccgggccacgcagttcgcgcttggaaggaatgtagggcttgccgttcagggtcattgtcatcgtctcttcttgggaggggttgtgaatcagtccagcaggttgttgaaagcgtcgtcgatcagttcatcgaggttgtcaccgacaacgcagtacccgccttcgcttgcatcgagggtcgcactttcgtagtccacattggcgcacaccatccatgcgcccttgaagaccgtgttgcgcttggggtcgcgcggaccgatgtagtagccttccttctggagggcgtgggcgcgtgcgaagcgctccgaagtttgctcagtgttcttgctcatgttcgtttccttgggcacgtggcccgggtaagggttttctttggtcagaatccactcgggattctctgcgactttggcaagtgcctctggcacagaggcaccgaatgtggtgatgatgcggcgtggccattctttgacattcaccaaaatgaggtgatcgtatcccgaagaccactcgattcctacttcaatggtcatttggtcgccgcccattccagcttgaactcggccatcgcttggcgcaaggccgtgtcgatgtgttcgtcgttgaggtaatcgtacaccggccacagagtacgcatgccaacgctgtcacccggttgcagctgcgaggcacgaagggcatcccatcggaaacgcatcggcgtcaggccattgttttgatagatggcttcggacagcgtgagcttggggagaatggtggtcagcgcatcgcgcagctgagtgtaatgttccggcttcatcttcatcatcaatctccgtcatcacaggtgcaggtggaccacatgtagcagtaaccgcaggggcgcaggtccgggttctcaacccaatcaccagctggccgaggattctcgctgtcggcgagcgcggcgcatcgttcgcatccgcacatttcactgtgcaacacgtattccttagccattgtcctcggcctccgtcggctcaggcagtttgtcccactccttcgttcctgggttccactcgtagccaagcggctggcccggatagtggatcatgtagaaatcgagcgcccgcaccgcacctgctccgtaacctgcgttggtgaaggcgtcttcaatcgtttcaccctcgaccagttcatgcgtgcccgaacgccaatacagaacgtagttcatgtttctttccttagagaatggtggtgcgccgcttgcccttggggtgcagcgctaccgagtggaggttgttgaggtcgatcaggtccgttggttcaaccgctgcgccgttgatatgcacagcgccattgttcatccatcgcctcaactccgaattgcttgcgggtgacttggggttttcagtggaccaaaagccacccgctccgaatttgtggatgccttgcaagtatgcaagcgcagttgtcagtcgcttcacaggtaaccccggtacaggttttccatttcgccgcccgtaacatagaaatagacgccttgcttcttgaagatatggaaccactccgagttctcaatctccttgatgacaaggagcaacgcatcgtgtcgcgtcttaccgccccgaaccacagtgtagtagtcgaacccacccgccattggaatctccaacgacatttctgcgtagtgaatcccgtgcttgggagataccacgttgaagtgcatcggcaggatcatggttgcgtcgctcggttccacccatgcgcgcttatgcttgcgcaccttgccaagcttgccggccagcttttccgtgcggctcttgccagttggttcagcgaggactcgggtggtgcgaatgacaatattgctaagggacatgctagctccgatgagtgcgttattttcaaagtgtgtttggcctgctctagacgacaggcagactttctcacaactacagtatagcacaaatcttctcggtgtgcggccacccctgattcccgttcagctgccgttcaggttcagttcgagcatcctttgaaaaaatcgacccattcgggaaacgaaaaggggccaccaagatcgctcccggcagcccctaaattcagcctagtttgaagtcgatgcccacagccaccttgctagtgaccggatgcacgccacgtaggactgaggaaatctgccgttcaaacaacggggcttcccaatccaagtacgtagtggtatcaccatgacggacgactatttccgcatcctctaacagcggcgcacctaccaactctgccacgcctgctgcattcggattgtacattgcggctacttcgatcacgtcatcgaaccctagcacttgaacttcaccactccaatttactggagtagttgcggcatggtctacctttgcagccacgtcgaagccacgctgccatccgatgatgctcatcagatggaagcctagatcgtacttgattacatggttccattgagaaccatcggtaggcatgttgttgtggtacatagccagcgcagtgattggttcgtgcacgtctgccagtttggaatggtaaatccattcggcggaaacaagcacacgatcatcaatcacgtctgacttatacggcttctcacacagcacgcgagactcagggaagcattgtacggactgcctaaccatcaggtcatgagtgctatctggcgtggcgatgataatgaggtccggagcattccacgtactcatcattgcgccagtcagtgttttgtatactggaacctgacgctccagcactgcttcttcgtagaacgaaccccactgattaaccagcaccgatctgctgtagacttcactagccttggggttcacgtctacgacaaaggacagcgtatgtccgagattcaaggcagcgatggcgtgagctttacccacgccaaggccacctacaattccaatgcgcgccattgcttagttcgggtagcggtcgttgtcgagcaacttggtcaggcgagtggtaatcgtgtgctcaaacgcattgacctgcacgaacactggggccagcaacacgtcgaacagagtgtggcgtacccaatccttactcaggagttgggctgcatcttccagcgtgtagtacaggtgctcgtcgcggtacatgtatgggtagcacgcgcggttgggcactaccggaatcgcgcctaggaccactgcatcaataacgctgtaaccgaaagtctccagcgttgcagagctaaacaggaaactcagtttcgccacctcggtccaatacttgtccttggtatcacataggacgaactcaatacctgcatccaccgcttcctgatacagtggtgcggtgtcgagggggaccgggtgcagaacgcggaaggtgcgggtgtcgccaagacgatgggccagttcgatgaagtcttcggggcgcttatcctctgcccaacgatggctccagcccacgacaggctttgcctcttcagcacgcgcagtcagcgaacggcgcagctgcgcagggttggtatcttgtgggctaatgaccggcagaccaatgacgttgacgttggtggagtttagtaggtccactccatagtcggtagctacgtaggtttcggtgaaacaatccagcagggtttcttcgaggctgcgtacccacgagcctgccgaatacaggaagtcacccggagtctcaacgctgctatggaagaagccggtcaggtgggccttgatgcctgcgcagtgcatgtggaacttgagcaccggaacggcaggcgaccaaccatcggcaaagtaaaccacgtcgccatcagcgatgtgatccagcacacccagcacacccttgcagaacgatttggtcatcgtctcgtcggagtagaacatggactgcgacgacatgctgttgaattcttcgccgctgttcacctcaacgacttcaaactcatgaccgttaagggtccgagtcttgtctgctgcggtttggcggagggcggcgatcaccttgttagtgatccacttctcagggcggaagtccgactcgggactgcgaactacaatgatcttcttcactttcaatcctctttgaactttcggtggtggaggctgcgagttacctcaacatgaagcgacggtccgcgctctcccttttcatgcaacacgaacgactctgcaatcagatcgaagttgccgatcatatacatttcgcgctcgtagatttgcaggcacttgctcttggctttggtttcgctgtagagcgtgaagtccggcaccttatagttgaatgcaggcaccagcacggatgggcgctccttgactggcagcatcgaccacgcgagcatggtgtgcttatgtagctcccgatgatggcggtggccatactcaccgttcgggttgtgcgttacgaggtagttgtacccattgtgcaactgctgatagatgttctccaccagcagcgcagtgtcctcggtcagcgtgccttggtaatcgtcgtccaacgcaagctggatacccctcgatttcaacaccttacaggcggcaaggaattccttgccgcgtgcagtgcgatgaccgtaagtggcacatagatcgtgccactcgatatgaggcgtggcctgccggatgttgtggccgaaaatgaaactgtcatccgggtgggccattacaatcagtgctttcatcacagtcctactagcggcgcgtcctgcatatactttacaggatcgtccttaccaatcatggcaaacgcggttcgccgcaactggcatgggccacagtttccgcaatgaagctcaccgccgtggtagcaactccagctaagatggatcggcgcttcaagcagcagacccgtctgcgccacttcatgcttcatcagcttgtccagagggttgaccaacttcggagcggccttggagccaatggcgatggccttctccatgaggtcgaagaactccttctcgttgtctccgaatgcgcctgcttcttcaagattggcgccggtgtagattgcaccaaagctccaccgatcagcatatgctgccatcatggcgaccatcaggccattacggaatggcacccactcattcgcgtattcgatgccgtccttgccggttgccacttccatcgtgtcgtccaccagcgggttgccacccagctgcttgaggaagtcaaggtcgaagaacttgagggtgatcgtcttcctgggatgacgttcaaccagcgcagcgtggatagctgtcactgcctctgtctcgcgcgtctgtgcccggcagccataatggaagtgggcgagcacgatattggtgtgatcccgacaggcgatttctgcactaaccgtgctatccataccgccggacagaatcacgatggcgctctcaggattgccaccgttcggatccttgtcgaagcgagtggttgccgccttgcctacgaagaaggagttccggtcgtggtggccattgaacttccaagtcgagttggcggcgatgtggaagtcagtatacatgccatcccgaatcagtgcacgcgtaatggcctgacgttcactggcgaataccaccgcagcggcgttttcgtggaagccaaagctagggcacacagcggagaggggccgatagttgcgggcgagccacagcgtatcagtctccacgtcgtagaccgctgacgcgacagaaccgatcaggctttcaaactcgccacgctcaaccgcgtagggaatcgcagcgctgtccaccttggtgcgggaatgttccgggatgaattgcgcatcgttggcgatgacgccgttgtgaacagcgaaatagcgttcagcgggccagttggcgtagggctgaatgtcatcctcgcgctggtcctgtagccattcagtagtcggctcggctcggcagtttgcgatcagggtgaaacttctcacctcgttcggagtcatggcgtcgaggttgcgcatcatgatctgcacctgactgattacagccagtgcacgtgcattgaggtcaggatgggtatcccgaatcgaacggaacgactgacgctggaatacgcgatgtgtgctgccatcaagcgacgtgatgaaggcagcgtagcccattgcatcacggccacgctcgcaactttcaacagccagcgtcatcagtgcgttgaagacgacacgcttctgctgtgcgtcagaccaacgcaggttatggacaccgaaaatggaacacatgtgggttactccgtggggtcgagcaagaccggaaccttgcgctcaaaaggaatgggcttccacgtcttcttgtagtcgaagacggcgaggccgaggttgagatacaacacgttcgccttgtagcacaggcgtagggcttgcaggagcatcacgttcccgacggtgtactccttggcgtattggtcacgcaggagcaacgtgttgacccagtgatactcatcgttctctgggcacatttggaacatgccaatgccgcatggggtgaacttgccatcctcgctaggacggaaaaccagcaccacgtcactgttgggaatcagcgaccatgcagcgatgtattcaaggtatgccaccgccgtttctgtcgcaccttcaaacgtcatgcccggattgaagtgttgcaggttcgagacgatgatgtggatgagtccagccttgaactggtcaaactccccaccacgcgcgggatggaacatgaggttggccgtgttcttccagctgcgcttcaattgcgacagtgattgcaggtgcgcctcaaaactgggacggcttgcaatgacacgaacctctggacgcatcgtgtgcgccagattgtccgacaggttcagcacctcatcgtagaaggcagggaactcagtgtcgcccatagggacaagtatggtccctgcgtcttcggtatggacttcctcaacggtaaagccattcggtgcggcgaccggcttgaagggtaggcccttattgcgcgccagaacctcgcggtatacgcggtacttctcgaaggctgcgcgaacgttactcataaacccatgctcctgcttggtagtaaggaggccacattttctctttgggggtggccgaacaaattgcgatacctgcatacgtcatcgtgtcattacacacgggacgcttgtactgactgtaggtgtggccttccacaaagtcagcagccagcgtggtatcaatgatggcggtccccgtctccggccgctgtaggtaatactgcacagcatgcgccagaaccgcagtgcccagcccattcggagcatcgtaggtggagtccttgaagaagccaacgaacacgcgacgattgacgcgcttcacaaacgtaccgactgccacaaggcgcaagccatcgtaaaccttgatggtgtcgcaccctgaaccagcagccaccgacattgccagcggtagcagcgaaccttccactaccaacggatgccacgtagagcacgtctctgctgtctgcgcgctccagtgttcctgcatccactcggcgatgactggaatctcgtagtcgaacaagggctcgacctcaaacgtgaggtgctcggatacgcgcagcttctggcgtacctgtgctctacgcttagtggacagagacgtgagatattcatcccacgtcatgacaccggcgcgatcacgataccctaggtacaccacgtccgacttgagtgagtagatttctcgtgggaagtcttcgccgtatctatgtgggcagtcaagggcaggaggtgcgacgactgcattatcctgctcaaaggttgggatggattgagacaggtcgatcaaggtgttcttgatttgatcgaccgtacctagcatgaagccggttgccatccccatattggtgaaccctgcgtacagggttccgtccgggtaagactcaacagcgattgagccgtccgtgctcacgtagagcggcttgtccgcataggaaggtgcaagctttctgcggagctttacccactgtgcttgcacgtccttatctagctcagggtagatcgagtttgaacatccgaaacgttcaatgtaatgctcggcagtcattacgtgcatggttattcctttgcagtgttgttcagcagtgcgtggcgcaacttgaggatgctttcgggatgagtcaagtcgcggtcagtacgcgcgtggaagagggagccccggaaggtgctgtagctgacgccgtattccactgccgtaacctgcgcacccttgacgtaagacaccaccgcagtgtggaaggtacgcgagaagtaatctcggatgttccacatttgcttataggtgtcatcccacacagagtagtgctggtccggtagcagattactcaggtcttccggcacgataccagcagcgccgtcgaggatcagcagataccacttttcacgaataccgagttgggtcaggaggttctgagtcaactcgatgatttcaggattgtttggaacaaccagcacgtgcggtcgcgtgggagcgtacagttccctagcagcttcgatacctatgaccttggcacgacgctctgccatcacagggttaggtacgaaatcgtgctcgggctcagcgaactcgtagcccctgcgcgactgcgggatgggcgtttccgaatccagcagacgcagcacgatggaggtttcggggcgaatggcacacatggcttccaacacaacctcggtcatgttgcggccgtagtctgctgcctgccatgcaggaccaacaatctcatcgccttgcagttcgaccgtggtgctgccgatagcgaagcacaggtaggtcagcagtggagcccacgaactcggcacaccttgcagcgtgtagttgccatccagcgatgctagataggacagcgtgttgaccagttcaggcaggctcttggaatccggactcagctgcgaggatgcgccgtcctcagtttgggaatgaatctcaatcttcatgcttcaacctcttgtagtagtagaatgcgtccgtgctatcaaggtcattaccaaacgaatctgtcttgtcatcgtagtagcctacgacaggcaggctctgctcaaacccgagggcacgatacaggcgcttggcaggatcgttggtaaccgaagtgtgcaaggcaacgccatcaaactcattcgacagcagcgcgaacgccttttgcatcatctgcctaccgacaccgtggccacgcatctgctcagtgacgtacacaaggtcgatataggcgttcggattaaattggttgaaaacaatgtagccgatggggttccgataccgccaccttgcgacaagaatccgaacccttccgccctcacgtgccgtcatcaggatgtgcgacagctgattgatcgtctcaagatcgaaggtgttgaggtcgtcttccccgaacagttcagaagtcagcttgaggaactcagccagcttgatctccgacacgtcgatctgatcgttccacttgctgtccagcttcttcaactcccatcccttaccacggatgtataccggaggttcaaagccgtactcagcgcagtagttgcctgcgcagaaatccgaatccaccacagcgtagtcgaggggaacgatgggcagttcaaagcctaccggaatgaacttttccttgtaggtaccttcggtgtctaggtggtaatactttacgtcgagcggcagttcttccgcaatgaatcggatcgcctcgtagatggcgaggaagccgatgcgacgcttcttgtactcttcgtagctcacacccggcacggccagcttgtccacgtacacagcgccacgcacttcaccgatgttggtgcagatgaggcggttgtccgcgtcgtagatattgaggaccaacgcattacggtcctcaaggttatgcagcatgttgttgatgtggatgatgttggtgacgttatcatccgaggtgtaggtccaccgctcaaggttggcggtgtagttcttgtggaagtcagcagacttcatcacgtcgcgcaggctaacctgctccacccgaacgccttcgttcaggcgcatcacagcacgatagttctcccggttcttcttcgacagggaggcaacgtagctttccatcgattcggggatgtagaggccataggacttgtcatcctgatagccatactcacgcgggtagatcgggaagtagttgacgatcatgcagggcggcagctgctcaaacacgtcatccagaaattctggcagcgccggtgggacgctgacttcaaagtagctcgcaccaaacaggtcaaacttggcttgcttgaggggatcacgggtgttccacagatcgtgcaggatcgtatggcctaccatctgcccggtgttcaggtcatacacattcgtaatcaccagcacgctttgatgcacaaagtttgccagcagtaccgaaatgtattcgtcgtaggtgggcagcaagtcaccaaagatgcccacaccatcaagtgctttgacccgatgcaggtactgctcaaactttgccttcgggatgagcttcacaacgtcagcggtgggtgcgacaacatgctgctcgccgaacacccgatcagtgcgaaactcgcgcagtccgtaattcatttcttcgttctcaggtaacgtgcatggttgaatacttgcgtggcgtcgagggcctgaatgccatcaaacaaaggaaggttggacccaagggcattcgtagctgcgtccttcttgatgcgctccacccaatcgcggaagtcgaggccatccatatccatagcgccgagggcaccgaggtgtggggcaaacgtttccatatcgacaaggcgcttgcccgcctgaccggcccacaggtccagcgcgaccattgcagccttggatgcgttcggggtcagggagaacatgctgtctacgctaatgtaagtggggaagtttaggccgaacaggccacctacgatttcgccttctgcgttgagcactgtgaccgagtacgctttacgttccttaccatagtggagtgccttgtatgcacgctgagtaggagtatcgagccattgcgtgtactcgtctgcatcctcttccttatcttccggacgctcaaccgtagcgcagtggtgaatcaccttgtcgaagccgacgttcagctggtagttccaaccctgcttgcgaatgaactgctcggtagtcttggaaacgtgcaggccaccaacaggcagcacggctcggcgaccgctgacttcccaaatccattcggattcatcctctgtgccaacgaaccccatcgggtgcgcctgcgccctgtctgccaaaccatacagaaggtgcggcgtcatttctacggtccagcagtagtcgtcatcatccagcgggaagtgctctgcattgatgtggcgaacgtcgttcaagtcgtacagcttgaacggaatcttagtgtcgctcgaagtgtccattcagttcgtttccgtaaaattcagtaagggtcataccaaggtgtgcagtttcgtcaacggtgtctgcctcaatggaagcagaatcccaaggagtgcgctgaatgaaactgttcaggtgcttgcagagagcatcgaatgcttcccgattcgtgatgaatcgcttggcgtgatcgtcaccttcgcgcccagcgttctggatgaccatgacaggctcacccttgaaccacacggaagccagcctccagaagcggcgcggatcgaagaagaattccttgaggacgcgcacttcaatctcggtgtctttgtgaagcgcctccatatcgaagtcgctgagttctacgtctaggccaccctttagatggttgaagtagaagccacgcagagcgtaaatggccggctcaaccttatcgaagttttcgatggcgtagacttcctcgcaggtaaagggaaccttggcagcctcggccctagccagctgatccgccttgtactcattgatggcgtctacaagttgagtgacctcacggtccccctgtgcaccaccgtccacctcctccatcttgatttccacaccgatacttttcagcatgggctcaatctttacgagggcctgtatgtagtgcatcggtcctaggccagcctcaatagctgcatagactatgtgggcaggcttgaacacaatcacagtttgttccgacattggaatctccttgaggatacagtctatatttacaggatcgggaaacgcaaaaggggcagccgctaggccaccccctttcgtgtgttctcaggaacgacccgcgaacacaaggcgacggcccgaacccttggggcgcaggttgccttccaattcgcggaagagcttgcgctccccgttcttgttggattcaatgcttgcggtcgtgcccttggccgacagttccagcgccaccacttttccgctccgggtggaaatcatagactctgcgccttcctcccagccctcacgaagacacgcaggcaccggggtcgtaatcacttcaacctcgtcacccaacttgaacttgaacggatacagattcacgcttgctcctttagtgtagatgcttcttgcttgtggtagtaccgtctagcttgaataggcggcgtagaacagggccatccagaatgaatgggtcaaagtattctggatcaatctcgtccatgtcttcctgcgtcatgcccattagcgcagcatactcctctcgggtaggctcgatgatggaatcaacataggtgaacaggtggtgcggatgagtgtcgtccccgaccagcgttaccaagccagcggcctgactgatacaactctcggggccgtagtgaagggaatgcagcttgcgaatctcttccagcatttcgtcgcgctcgtggccagtgcgtgcagccagctgatttcgagtgacgatatacatggggtcttcggggccacggtcgatcttgaacatgaccaacacattgacccgctgtattccggttgctacgatttgcgccttgttgttggagagacgcaaggtgtagtcatgaccacacacagggcaactccattccatgattccgtttgcagggatcggagaacaatccactgtagccttctcacagttgaggcacgttgcttcaaccccgttaaatactttcttggtcgaggtaggggacgacacaaacactccgaatggtgagggcgcattgctgcgccctatgggttacttagtattcgtcagggacaatatccggagacgtggtggacggcggggtagtgtcgtcctccgtcttgacaccgaggcggttcaggacagcagcacccgctggggtgttggcaaagctttcaaccatcgcgcccatgttcaggccaccagcagcgccgaacagaccggagaccttgttgatgccttcggtcggggtaccagtgttggcgatgaccttgacgcttgcgccttccagcgccttggcctgtgcgatgccgacttccttggtagcgttgatgctttccacgctcaggaggtacgtctgatagccttggttctcaccgatttccttggccagttcgatctgagtggtgaccggggcacgcaggcgtgcagtctcagcggctgcctcagcttcgcctcgggcctgaataccctcagcctcacgctgcgcctgagtcagtgctgcatcggcctcaagctcgatctgacgcttgttaccttccgcccgaataacctgcgattccttctgcgcagttgcggcgatcagggccgtcttctgctgtgcttcggcgttgattaccgaggtctgacgatcttcctctgccttgaccacactcacttcacggcgaatgtcagcgcctcgcacttcctcaaccttgcgcacttccatttcgcgggtcttggtgaccgcagcttcctgcgagacttcctgctgggtacgctcccgagcaatacccacagtcttttccttctcagcagtacgcttgccaatcgtctcttccgattcctgacggcgcatttccacttcctgctgggcttcgatttccaccagcgaagcagtgcgcaggttgcgtgcgacctcagtacggctttcggattcgatctgagaaatcttctttgccatgatgttggcaatgacttcctgacccggcgcatccttaatgtccatcaactcgatggacttgacgctcttgacgccccacgccggaagctgctgctgtacgtcctcagtgaaagccttaccgaaggtgctacgctcggtcatgatttcgttaatgtcgtaggtcgccagcatcgaacgcgctgcaccctttacgatggattccagctgggaggtcagttcctcaaagttctcaacgctctgcgccgccacgtccgaatcagcgatctggaagaaggcttccacttcgatacggaacggggtccgatccttatcgtatgcctcgtagtcgttcaggcgaacgctgaacatggtagtcggcaggatgcggcgagtcataccgatgcgcgggaaccattccggccacttgtagtagacgttacctgcatccttgtccttgccgtagctgacggtagccttggcttgctggacaatgtgtacttcgttggtggggacaacagtgcggcgaccgaatgcccaaaggcaaatgatcgcaagcagtgcaaggatggcgagcactgcgataccgatgacgatgattcccatagatgaaacgtttccttgtggttagtagctgttaccagcggattgtggtgcctttgatgaaaccggaacacgctatgccttctaccttggcaccttgaggggacgtagcgcggaacttggcacggaaggtgtcgctgtcagcgcaacctagccatgaataaccgaggtattcaacgtcggtgtagccctgcgcgtgcagagcctccaccatcttgccctgcccgaaggctcgcgttttcagcggacctccgaggaagaagatcgccaagagggcgatcactgcgactacgatgaggagttcgatcagagtaaagcccgattgcttcttcattgctgatccagagttctgaggaacttgcggcgacggaaaaggtcgtacttgagagtacggaagaaatcaaccacaggccaccacagacggtggaccagtggatcgtgcttgctcacatgccgataaaccgcacgatgctccatgcgatcaagcgccattagcagttcacgctctacctttacaggatcagcgccatgcactgccgtggcgtggaagcgtactgcacccatagactggagcttttctttgacgcgatccgtagacgcgcctttattctctacgtcaaacaatggcacttccatcttagtcctcgttggctatcttgagtaatacgtgaccgtggcaaggggcaggtgcacaccagcacaccaagtccttgcctttcaatcgctgcttgattttacgcaccatgttcggatcagcgagcacccattccttgaatgcctgaatcgcctcatggcgcgaggacacacggaacttagcttgtgtgccatctttactgccgaagggattgccccactcagacggcctacctatgtagacagcaccttcgggtgcgttcccgcgtcgcttgttgtatacctttggtcccgaaggtacgtcaaagagtttcttcacttgatgcctacaaatccgaggtagcgatagggagcttccattccccacttgtcgcacaggcgagtaatcatttccgtgtagtgacagccatgcttggtcttgaacttctgctccagattgttggctatcgcgcgccatcgtcgggtagcctgctcggctggagtgagggcttccccgtccccttcgtcggcatgctcagaatcgaggtcatcgaactctccgagcacattctccccactgccgctctctgccaaggatagagccctacagatgccttcctcggttgctctagcgaggagccagatggaatggtcggggtggtcatggggtatctgcacctgtagtttcatgctgggattcgtagaattgttggcgagtaatccactcgccgttgtgccacaggtagccgagttcaatcaacttttcgaccgccttgatgcgacgtggagttcccatgttcctgtcgaacaggtgggactgagggccttcactcatttgcggatacctacgagtacgttggccttgatactttcgagcacatcctcatcatccgtatcgtcttcatcccatgtaaggacgggatcgagttgctcgaaatcgttggcatcgtaatcacaacgccacgcatcgacctgagcgaatcccgcatcgcgcaacatatccgttagctccggttcagagaagtagcgctgacagaatggattcttgatcttgaccgatacgaccacacgcccatcgaccttgatggaaatgttactgaactcgtcaatgttgttagagattgcccgatcgtagtacgacttgacgcgggcaactaccgttacattggagtaccgagtgttgctggcgaggttcttgctgaccagccagcggtacatgggagtgtaacagtctacatggaattcttgggtggagacacgtccattcatacgttcatcaggggatagcgccgtggcatagccatccgagcagaaatccatgatgaagataccacctttcttggtggccgagaatgccgagttgatgaagccttgtacgccagcgcgagtgacgatgccgcccttgtccatatcacatacggaactcggcgagtaatagtgggcggtcacaatgtcccactgctgcttgaaaacgtgctgcgtaatatcgcgcacttggatgatgccgggattgcctgcggacagagtgccatcagtgcccgaatacttgaggccctgcacaggccatgccttcttgaagtaatcggcatgtttgctgtgtgcaccggagagaagctccagcagtgaggatgcgcgcggacgcatttggaatgcgatatgagcgaaggcatgcgcctcctgcatcttgtacccttcgctccgattgtagatggcttggtatagctcactgaaatcgtacaggtgatgcagcttcatgttgattgttttgcgcggacctttcattccttatcctcgttgtttgtctttccaaagtggagaggtttccctccccacgaatagttaccagtaccagcgatcagcccaactcaggatgcgcttgctcggacgttccacgtcgccaatgtcatcgaggtcaacgagcttgcgtaccttgtccgtgcagcgacgggaggcagcgcgcagcttatgctctgcgatgttacggtagcttcggggaatgcttcccatcaggtaggcccggtagccatccgaatggaagtaagcgacagcagccttgtgggctttctcaatgtcggtgtgaccatagactcgctgacagtggttcagtacaagttcttcaccagtccaatactcggacttgtattgacgcccggggttgaaattgtcgtgaacgtgccagttcaggtcatagtggtttcggcgacggatggtgcgactcatggtgatgccctctcgttgtagttaacgatcgggtatcacgaatccagtaccagtagctcttgctcatgctgttcctcagttggtgttcgggaaagcgttcatgatggtgtcgatgtgcgcgtgcatagcggccccgtcaatggtggtcatgttggcagtgtcgttggcaatgctgcgcacagcgttgcggtacgccagcaccagctgattgctgcgctcggccagcagctgctggaggcccatatcagcaactgcatccggggtttcgatgtgagcgttcaggtggatggtgtggttgctgccagtgttgccgaactgcgggtaggtaacgacacccgacagatcgaacacgtaaccacgctggtaaccagccggggtagccgaaacaacgacgctaccgcccgagccctgagcgcgcagggcatcttccagatgaccagcgacggcagtagcatcgtcaacgttgacgatcagcgggttgaaagcaatggtgatggtttcattgtaagccgacattaggattctccatagttgtgtcggtggatggtgcggagcgttatgctccttcgtgcaccgctgccatttccgcagcggtaaggtgcctgcatcccgccatcagcatttccatgcagataggacagtggtacatgccaataggcatgcccatcaggagttcgggatgctcatggcattcaaagtcagcgttgcggtagaagcgcgcaagcaccaactggatgttctccatcttgggatagtcgtagtagacgcccccgagtggcagcgtggatgggcgctgccttgaattcagcagaatcgaaaatctggcgcaggtacttgttgatgaggtccagcggacggctaatgtcgccaacgtggtcaatcaggaaagcaagatcgacgcacttgagaacacggtcatcagcgcacttgaccttcgcagcgtagatggttcgctgctcggacttccacgggatgaaagaggggtcactttcaaagacggccatcgtcacgtaggacggcaggtagcccttgtacggaagattgaccgagaagccttcaatctcaacgctcttgttggtgtcacacaccacgatgtagggaatgtcgttcactcagtaacctccacctgaatccacagttcacgcagcttgcgcaacgcctgataccgtgcttcctcaaagtcgtcgtaatcgaacacgaacgtttcttcacagaggtccacacccggcaccgtaacgtagtcacctttgccatagtgctgggtgttggcacccatgatagggtcagtcatccacgatgcgttatacatgacctcatcagtgcagcgggcgagcttgatgatgaagatgacacgctcagcccgttcaccctccccacgattcggcactacgtccggaaagccctgacagaagatgtgacggatgaacaggaaaggaatcttcacttgtccgtctccagcaggcccgccttgatcgcacgcttctcagccttcttgagcatcttgatgtactcaggcagctgcgccacgggaatgctcatgcccttgccgggattgaattccttgtcgttctttttcttgtaccacgtgcgagtatcgaccaagctgcgaccgtcctcaaacgtgttgatggtgacgcggagttccgtggtgtcagtctcagcgaagatgccgatgttgcgaaccttttcaggggcgaacgtcttggcgggcttctcttcgcgctttcctttggacttgctcatgtgttcctctacttggagtgtaagacttcgacgtgtgacccgcccggaatcaggaatcgcttgatcctgtagtccacggcagggagggtgtactctacggcgcgaatggcgccggtgtgaatcatcgcatcaatgaagttacagattccatgtgtgctaaagcgtaccgtaacgcccgcagtgtgcaagcgtgacattagctctggaatgagttccatcgccttgcatccttgcttgatcgaaacaatctcgacaatcatcctccgaagaacctgtgcagactcttcatcaatggcggacgcatcatcgcactgctgaatggacatggctagtaccgagaaaggtgccccgaagggcacctgtaggttagaggtcgttcaactggtcacgcatatcgttgtcagcgctgacgcgagaaagtccacgcccggtccaactattgccgtagctggatttgtacgcacgatgcagacggcacgaatggcacttgcaatgcggcttcgtggtattgatcctacgccgagcattgttgacagcccactccttctgattgaagtaggactccacgtagttggaccgagagggatcacccatcttttcagtgcgaagggtgttctgcttcaaacgctttgcaaagatgcgttcacggtggtgacgacgaattgcacggttcattgctggtctccataaggccccctgcccacggcggacaggggctgcctatgacggaaatcagcgattcgctcttgacgttcatgctcacctcagctgggagtctttcgatccgcgacggttgtaatacgtttcgccagtaacggcgtacttgctttgacagcatacacaccgagttgcgttgggcatcgccttacggcgtgcgaggggaatggggttgtcgcaatccacacaatcctcagtgcccgttccttgtagcatcaggcgcgctcgatcaatcgcgttgttaaccgttgcgtcaatcgtatcctgcacgccatctgctggtccgaaacctactgccatcttgtcacctacttagaagccgtggtagtcgtcacgcttcactgcgttctcgggatgctgtgccgcagtggagctaaaccacgatacacccttcatcttgtccgggcccatcgtggtcatttgctgctcaaacgccgccgccagattggcagtcagcgtaggccgaagttgattgaattgctcagtcgtcattggttccctcaattaccttggagagtttcggcttcacgtatttcagatcagccagcttcttgatggtcgccagattggcgtactgcttcaacatgctggagattgcttctgcatgcaggcccttttccatcttgcggcgctgtaccggagtcagcaggcccttgcggaagagggagtctgcatccgaaccggagtagtgacgctggaactgctccacccacttgacttccagcgcgaaccgaacagtctctgcgttggtgggccatgcgcctaccgtcagcagcgcctcagtcacttccggcgtgaggtaccgagcattggaggtgtgcttgcgaggagacagcaggaggatgttctcgttcctgccaatgttccttcggtggtggtcaaactgactgctgtagacagtgccccgagtacccactgcgaacagaccgccagacaggttgtagacgcgaggacgatcagggtgcagcaccactgagtccgaagggaacgcgcgcatctgaacgtcaggcaggttgagttgcggggcagtaatgatgagagcagtcatgctaggacttccttatgcgttgatggctatgtaagccgaggttgggttgcacggttgcaggtcgtacccattgacgtagtaggtacgggtccagaaagtacggtcaagctgagggacagcaatccagcagtcaacatcaactaccggcttggagaaagcaacctcaaaccgttcacgcttgatggtcaaggttggttggagcggtacgcccgaagagcgagcgtatacagcgaggtcacgattgtgttgagccaccaaccgtgagtacctggtacttgtgaaacgttgtgcgtgtccgggcccaccgttgtagcacacaagtgctctctggctgtgaccgaaggtatcgacacactcacgtagataaagagcagctactcgcaaccccaattcagtgtcgttgcgtagacgggctggcgttatcgtcccgagttctggatgccgcgtagcgacatactttgccgtagcaaggtttacgtgcccgacgccgaagtgcttgcctcctgcgtctgtcgttatcctgcccagcgaggactctcggaagacgagtccgggcagcatgtccgaaactccatactccgcgccaatctgtgcagacaggtgcagtacggtttgctgtttcggggtaagctttagtgccatcgcctctgacgcgaacggcacaaacataagaagcatagcgagaatgaagcgcatgttaacctcatgggtgcggtggccctgactgtcctttatgtccgggtcacattgtctactcaagctccgccggtgtacggctgtagaggattaatgggaagggttagaagatggttacagcaagaacggcccacatgactttacacaacacatgcaaaccttgatccacgttgattccgattaagcgttcgctcttgagaaaatcaattgcgaagtgacacgcagtttccagtacacccagcagtgcggagcctgttatgagagcaaccgcaccaccatgaatcatggcgtgtgcagtcagcgcatgccaccaaggcacgtgcttgtctccagtacgtctacacttgtttgctgcgatgaatggtccctgtaatggatagtcggccaaggcatgaccaactatcaggaagaacagaatggataggaactcggtcaatcgttgtcctcgatttcttcgtcttcatcgtccggatgaagctccgagaaggttccgtcggcgttcttgacttgggtaggcaacgcggtaagcaacttaccttcgtaccaatcgccaatgccccgccagaagctgccaccctgaccagtgtagctagttcccgaattcttgcggtagcccatgaactccaacacgtagctaaagaaagcacacagcagcggccaccaataggtaaggtagaactcacccatcttggcttcgggcttctgcaccttgtagaccttcatctgccagcgcaaatgggagaaggcgttggccactccgatcacaagaagctcaaacaggaacaacaaaagcaggatgccaagtaggctccataccaacacacctgttccgaagaacaacgttttcatatagctcactcaacaacctcctgattggctgggtccggcgtcatgtcgtaccattcatgcccctcgtagaacggagccactccgaccacaccgccaacatcatcatgcagggagggtgccacagtatctccgaattccttggaagcaacgtaccgccatttgcgcgggaggccggtatcgtgtttgccggtagggtagcaaagcgaacggccttggtaaaagaagaagcattgatcgccaatgcgaacaccgagctcggcattgtcgtttactacccacttgacttcgctggcgaggattgcttcgcgcgaagacggtccagctgccgaacgcatcatgctgagatacgatcggaagtctacgatgttggtaacactcacgcgcatcactgagccattaggccagcccactagggcctgcggtgagaataggaccacctccacgtagtcatcggtcaccgtccatcccgtaatgaagatgggattaggcgaaccattcacttccttgttgtatgtcctgatagctgcttcaacttccgttgcttccatatcgcaccttacaaagtccctagttctttccgacgccgcagtgccctacgtaggtctgcaacgtttccgtattctgccgaatcttcaatcatgccgctgacttcgcgcagcagcgtgtaacgctgtgcaatcacgtctgagcgcacaaaccatccgttactcagagtgagcatgttgttcgtaaccgggatggccgctgcgtccacgccaagggtagtggcgagcttgctgcgtacaatctcaagatcggcctcaaaggtcttgttcgtgtttgctgccatttgatcctccaagaaaaactgaaagggccctccgtggccctatcggtgtatcaggttgcttcgctttccgcacccgaagtgacttcggttgggctagttgacttggcaaacggcacgccgcgctggatgcgttcgtggacttcctgacgattgaccggggtttccttcggtgcgtcaataccgattttcacttgattgcccttgacaccaaggatacgcaccgtagacatattcgagccggtgccaatcatgactgcttcaccaatgcggcgagtaagaagcaacattttttgtttctccgtgaaagtagtgggcgactttcttggtcagccctagtgaattgaaaaacgaatgagacgttccgtgttagacctaaccacgcattcgattgctgtgcccctaggtggtgctgcgcatagggcgcagcttgtcagagcgcatatccaacaagctgcgagcgtcagagggctccaatcggatgcgtgtagatcgttaatccttacgtgtttgagtggttgcttgcgcgtgattcaatcaaggtgctgctataccttatttacagtatccgagctacccatttgagcgaaagcggaacgccaactatccatgcgtgcctgcttttctggatcaaggggcaggctgtgatagaaggggtcatggtccttgaccgtcctccccgtgatggtcagcatggtcacgtcgttcgaccgcaccgcacaagagcgcaggcaaccgggacatatgtgaacgtactcctgcccgtgaggcacatacagcatcatcggcggttcatgctcaggatgctggcacggcttccacgcttcctgcacggggcgcatgtgggattggattttctcttccagttcagagaagtccgtcttgatggtaagctgttgcttgttcattgctcgatcatcccaagttcttgggcccgaagaagagccacgtgtttcgtgttggcttcccacaggatcgaatcggtccgatgcttggccacgtcggggtcatggttgaactcgttcatcaacgcctgaccatagcgctgatgctgcggcttggtgccgaagaacttcttgtcgaaagcgaccagtgcgtttgcggaaatcactttgcctccatagcatcggcgagggtcagggttgcgacataggggaccgcaaccgtggacattgcgatgaactcccaatcacccatcggatcaggcggtacgaaatgcgcgtccttgacctgaactcccttgctttccagatagcggagcacttcgttgcgccagtcttcatttgccatccactcccacccacctaggtccgtattgcgacggggcaggcgatagaagcgtaccacgcgatcctgctgtgcagcttcggcaaccagcgagacgaaacgctcggctgcctcgaagccagtctcagtgggcacagcacggccgatgatgggaagggagcgaagggtggcgatcagtttcattcggttctccttgatcgggcgcatgacccgacaattcctgagtcagtagattggccagcgcggccatgtgttgttgaatgatgctttgctgctcacgtttctgctcggtgggagaaagagcggacaactcgatccgcttcttccagagcgccgcgttacactcacgtgcaactcgaccaacgtgttcccgcgttttcttattcactttgcgcgtctgcgcctccgtgctagccgggcattcctatagtgctgataacccggaatcaaaacaaagggtattgcgacaatgaagcctcccgccagaagcagcaggagggcaacacctaggaccgtgatgtggcccttcatgccagtggcgatccacattcctaccaacccaataccaaggaaggcgtacaacgtgacgaggctgttaaccccgcgtgcttcatgcaacaacaggaatcgcaggaacataaccgctccttacatttgaatggtggcctcgccgtagtggcgaccacgcaccgggaaattactgacgccagtgacgccaatactcttgaggacaacgctgatgcgtcccgcttctgccggggtcagcttggtagctgccagcagcttagtcatttccggcgactggaaatggtgactcaggccatacttcggatcgtcacgcaacgcgatggctgcacgttgcagactgagggcgttggctttgtgcaggggattgatacccaccgcgttgacggtcttgctcattcgtcgaactactccggttagttgagcgcgaggtcgcgttctttggtcttgtatgcgcacatgattgcacgcgtgttcatgtagtcaggatcggacatctgctcaccagtcgtctgaccgttccacataatgtcgaagatgcagccgcagaagatgttcggcatcgtgcgagcttctaccagcacttcctcatcatcgaagcccatgccttccgacgccttcaagtcagggacgcactgtgcaatgaagtgcgcccgacgttcgtctttcgacggtgccacgaactcgggcagcggcttgcgcggcgtaccttcttggatggatttctcaatgtcctccatgaggacttcggaggtcgtcttctccgtgaccccttgcggcggcttggactcgatggtcggaggggcggaagggatggcgctggcggacggaggctgcggcccgaagaagtacagggcagccagcacgatgacagcgatcaggagagggtaaacgagccagcccggcggctggaacttggacttcttttccatgacagattccttttggttggcgacctatgaaattaggtcattacgtgatttcgaggccaaggcaagcgaaggtcaactcaccgatgaatttaccgcctgcacactccagtcggacgaaagagcctagcggcaccatcttggaccgagcgtatgccttctgttcagcgagatacaggacaccaacgacaccgttcttgtagtccgaacgggcggaggaagacaggtcggaaatgtagaacgtggtgctgccgtccttgttatcggtgacgcgatccagcacgcctgcgatcaacagctgctggttctcgaattcgccgaggcggtggggttcatacacccgagcttggtagatgccaagaggcagggtttccttgaaccccttggcattccactcggccctgctgatgatggtgttgacctcgttgtcattggaagcggcttggccgttccccgaacacgccgcgaacagtgcggtcagggtggcgatgacgatggcacggaacgaagcgctcagatacttgtgcatggtgaacttccttgacggttgagttagtgcttgcaggaacaggagttgttgtgccggtgcacgtgccacgcacgcatgttgacgatgtgcgcaatgatgagtgctacaccgaacaccaccattgggatcgcgtgtagccattcggattggtcaaaccagtcgtgccagatgattgaggcactcatggcaaccgcagcgaggaacatccacttccacgaatgcggatcacgatgacgccatgtgccaatcgccagcgtggcagcagcgaacgcaaacgtaccgagcagcaggtaggtgtggatgatttcttcgccttggacgaatccaaagaaggagacgccgaagaacgcgaggacaggaacagcggcgcagtgcacagcgcacagagccgatgcagagataccgaggcggtcgagaatcttcatgttaggccctcagagcgaagttatcgtcatgagcgcagtcaccgatttcttcctcgtagaagcgaaggcccttggcagtcagcttgtagtacacgtcggtaccacggcgagtctcgatcagcaccgaacggaacaggccctgacgaagtgcccacgccatcgtgtcggtgttgatcgcgtcgccaacattgaggatacgtgtgggccgaccatcttccagcatgccgatgcggtagctgtagatcggacgttcaatgggccagccgcccttggtgtgaccaatcacctcgttgcgttccagctgcgggaacaggatgcgttgcgcagtgttgaccatgatggaagacagcacagcggtgatggcggcggtggattctgcggcagtgcgacgattcatttccagcttccttggttgaagatattgagatacaggcgctactcactcggagtagatggtagggcgtttggtttgcttgctcttgagttcgccagtgagggagcgaagacgctcccacgtgatcggtccagccatgcccttcgctttcttgaaagcagtacgcacgaatcggtcttcgcagtcgaggcgttgagccatatcggcgtagctgacgttctcgccctcgatcaagtaacgatcaatcttgaccgggcgcttcttggcaaagtcacgctgcgttgcaatgtggaagccttgcatcgtaggtgctttgtcgggtttgctaaggggatcgtatgatccccgtttgatgaggtgactcacagctttttccattcctcgtaggtcatgacttgcgtgacgtagcccggccacgtcttttcagtggcgacgttgagggcagtttcgtgcaagtcgaacaaccacggctcaacatcgccgaagtccttaccgaagtgttcgatctggccataggtgcccgcgtatcgacccggctccccattctccagtgcgacacgacggatgatgcaccagcgcgtaggttcgatgaagggtataccctcagcttcggccatgcccttcgcttcttcgaccgcttccttagcggtggcgtaactgccgaacccggtgttgaacggttcatgcagtccctcttcatttacaatgatgatgacggcgaagaagccccgaatgccgtgcgtcacagttgcatatgcagtgatgggcggttcgtagtccgggtagtgctccttcaacgcctcagcaatcgtggcttcggtgtcgaacgtgttgctcagttccttcggcagttcgtagaacgtggagtaatcatggtcatccatgaagcccccgaactcgcgcgcatggtcatcgttgaggatgatgaagcgaccgaccagttcgtacttgagcttgaggacagtgtgcacaccattctcagcgtattgcgatcggacagtgcttgcaccctttcgctcacgatcggcttgttcttccgcagccttggccgtgcggtacaggcccgagcagtagtcctcgtagttgcagcaggtgcagccggtgccgtggtggatggtgtagcagaaaccgacgggtgcatgcttgctcatgtttcatcctcagtgctgtaggtgcgccatgcgctttcgcgggcgggtgcgtaacgcagatgcttgacggcgtaacggtttccgtagtgatccgtcttccactcatcggtgaacccgatttcacgaaccgctgcttggtaggtgtccggatcgtcctcgtagtaaccgttggtgttgtcgatgctgtgccagtgggcaaacttgccaccgcacacgttgcacttgttgggatagctcgcgttgtgcgtgtcccaaatcatgtggtgcccgttttcgcacaggcgttcttcacttcctcgatagcccacgtcacttcctcttggcgtagtagcgatgccccttgtgggggaatgcgttgtggccgaacggatggatggtgtccaactcgtagccggaactatggcgatagatgcgcgtcgtttcgtgtgtcgaagtggttttcgttacgcggtccacatacacacgttgatcgtccatcaatgcctcgcgcacgatctggcgcacttgacgcaacgtgcgaaccttgcggtcgatggggatttcaccgaagacttcatacacgcgacggcgcttgtacttcggacggtttcggctgaacgatactgcttccttgaacgctgctttcaacagcgcgaccgaatcgccgtgatgctcctgcggcgaccaaaactcaatgaagcaccacccgcccttctcatcatagctttgcaggaaggcgtgcgactttcggtgcgccttgtagtgagggctctcaatccagttgtccgtgacactggaacgaagggcaaccatttgctccggcgtgccgttctcaacgacgacgccccaattcttgtcagcgaacggcttgcagtaggtgaaggtcgggcgacggctcatcctgtgaaactccttttcatcaaatcgcgtgggttcggatactgctgtttcaacttgtgcgttcgcatagcatcccgatcctgccggatgagttgcttcgctttgtctttcaccgtcagctgccaatcgcccgccgcacgcaacccacctttcacgctcagggatcgcagcagggattgtgtggcgttggtgttggtgattgcaacgatggggaggatcattttgtatccctcggatagtggtaaccgaagaaccacaccgggtagccattggactggttggtgtagtgagtgatcttggtcagtacgagttcgggctgatcgaaatacaaccgcaggaactcttcgatttgggccggagtgcgctgcgggctatagaaatactgacccgagttgccccacactttcttagcgcaacggtcgaacttgctgctatcccacgagaacatgcggtcactatatgcgccgctgttgaggtgggtttccaaaacgtccacgtgattctggaattgaacacggccaccgaattcatcggtaagctcttggaactgaccatccacgaagacgaaggtgcggtggccgaactgattatccagcgacatagtgcttcccctttagggccttgaatacgtattcgttgatgtgaacgaactggaaacaagcagcgacgcacgcagcaacgaggaaacacagggctaacacaagcttgcccttgccagccaacgccacacaccagcacgcataggtcaacacggttacgatattgagatttatctccaccctatctcgttggtagcaccagccaaagtaaagcagaacgtcccacatgttgtagaagatgtacgcccggtcaccgtggatatacatgcgatcactccatcgcatcaagtgcagtacgaacgaattcgcggaagtcttgatcgctcaggttgttgatgttggcgcgcacctgctcgacgaagtgctccgctttcaaggggacgcggttggtaactagattaccccgagtgtgcttttcacacacggcgcagaagtccctgtaactcgccctgcgcacgtgatgcgcgggtgtactgtcaggcgtgcaatcgtcgcacaggtaagaggtcttgacctgcacgcgcaccgaaagatgcttagactgaacttggttcatttacccaactccttgtagaaagcaatgtccaaccgccatgtggcgaagacgatcagggcgaccagcaggttgattgatccgatgatcgagaacgcaagccctaacgatttgaagaaggctggcagcgcgcacatgatgctgccgatgagggtgcccacaatgaggttcttgcccttatggcgcttgaaccacggaatgaatcgcatatccattagcgcttccctggcttggtctttggcatgccgatggcgcttgaagcagcccggcgatccttggatgatttgatcttgagtgcagcgtcggcgtggcacttggccgtgtagatgttgaacgtctctccggtacgctcgctacgtaccttgctttccagtgcgccatactcgatgactttgtgaatgccatcgcggccttcgacgcggcagaacttgtcccaagactggatcattgcgttaccccttgtggtgaatagtcaggcgatgcccgtgcgttacttgatgatgagcttttgattggagcagcagtccaacaattgctcgtacacttccggtgttacgttgacacagccagcggtaatgcctcggcggtcagcagggttgtctgactggatgcgacgttcccgatgctgtgcgttgccaagtgtgtaggtgcggtggatagcagacacgcccttggcagtgtgcctgaacatgagaacgtcgccgccgtatcccggccagtccgtctcagcgtgcgtcatctgaaactcgccgcgcggagtatcggttcctactaaagcaggatggcactgacccgcaaagcaaatcagcgccaacgtcacgtctacgattaccatgatcctttccttgaaaggaggggcagcctaagccacccctccggtgaatcaaccttcgatcttgctgcggatgatgtactgcaccggcttcacttcctgcggcagttcgcacaggcgaagctggatggtagtgaccatgcgctgattggcgctcgacgtgcccatgccagcctgaccccattcctgactgcgaccaccgccgcccagcgcaacgttgcgattacccgaaacaccaaccaccgtggtgaacatggtgacctgatgcccgtagtagcgcgggccagtcggaccttcaaaggtcaggtacggcaccaagttaccattggcatcggtgtagggcaccagttcctgggtgatgccttggtcgatgctcgacttgatgaacaggccgtggaaggttccgttgactcgctcagtcacaaccttttgcagcggaccacaggccgacgtttccttgatgatgttgccagtggcgacatacgaggaaggagtcagcggcacgacagctgggatgctcagggccagtgcgcggtagctcgaattgttggaagcgtcaacgtgcgtgctgctgttgccactgccatcattcgacatgctgctcgactgcccaccaaccttggtgctggtcgattggccaccgacattggtggactgaccaaccgcgttggtgttggcgctgctctggccctgcgaggccgagttcgcattcttgttgctgctgttaccgctgccgtcattcgacaggccgttgatgctgctctggcccagcgcgttggtgttgttgccagtggttgccgagttgttacctccggtcagcgcgttcgcgttgccattggtattgctgctcgactgaccttggccttgcgatgcggaaccgccctgaccacccgcaccacctgcaccaccagcgccgccgttggcagtggtcgtgttgttcgacccgttgccattgcccatgttgctgttggaactgttgccgccgttgatggcgttggcgttggaggaattgccgcccgtcatatcgcccgtgcggttgccaccattcgacagggagtttccgccgctgctactcgacgtgttgccaaccgaggaacggttgtcgttgtcgttgttgctcaggttgcctgtggccgaaccgcctgcgccaccctgagcatgaccaccctgcaccgtgttgccgctttggtcaaccgtgttaccgctctgctggaggttgttctcaccagtgttgctgttgcccgattggttcgatgcagtcgagttgccgatctgcgtggagttggaattggtgttgtccgccgtggtggacgtgtcacccatgttctgattggagcagttgaccgtaccttcggggcacggcgggttctgcgccagtgcggagaacgacagggacagtgccaatgcaagaatgagcttgttcatagattccttttttagggacgccttcgctttaatcgtaaccctgcgcctcgggttaccgcgctaatgtgaagcagggatacaccatgtatccctgccgtgctaccgaagattactcttcgtcttcctcgtcatcgccgttgtcgtccggattctccgtgatggcctcctgcgcagcgcgtgctgccttcttttccgcacgcttgcgttcctgggctgcctcttcctccgcttcgcgtgcagcacgctctgcatcggcgacggcctgacgtgcctggaacacttgttccatcgactcacccagcgcgccgtccagcagttcttccagcagcttgtcagcgctcagttcgccttcggccgtcgcatccttgttcgccagaagggccgcagccttcttcttgagaaccttgatgtgcggcatgacgttgacctcgtagttctcggccagttccttgctggtgaacagcttcccgtccttcgccttgtaacgcgtcaccttgaccgcgccagtggaaccggcttcaaccgtgaagctgccgtcagcgtgtgccttgatcgcgttgcggtagtctgcgatcaggccgccgatttccccttcgatcagttcacggaacatgttggccttgcgatcctgcgcgccttccagtgcagtctggatcagaccacgcatctgtgcgaggcagacggcctcttccgactggaacaaggtgttggtgccatcggcgatccagcgagcgactttctttgccatgatgctacttccttctttgagtgatgttgcgagtgggtgttacggagtggtgggttcttgctcgatttcttggacagcagcgagcacttctgcttcgggaatctcgatgtagttggattcccaatccaacttgccgaacggcagcatgaggcattcatccggttccattacaattggcacgtcgttgttatgtgccatgaggcgtgcaattgcctccttgagggtcggcgccatcaccgacttatcgtagatgaaaatgtcgttctgttctttttcgtgatcttccttgaaggtgtagtagagacggtacttgttgttgggaagtcgaggctccataacctcttcttcatcatcgacataatcgtccgaagaatccgtggcgactttgccataggactcacggtacagttcacccatgcggctgaggtcgtcaggaagtgacgcagtgaccgagagtgctccgttgcagtagcgaacaacgaaaacctcttgctcgccgccgtcaacgtcaatgacaagggtatccccttccgcgattacgatacgcattaaagctccccgagctcttgctcgatcaggttgagattgatttcaagtttacgcgcctgctccgtaaactcattggcttcgacatggagccgccgaatatccgagggtagcgaccacagcacttgatgcgcaaccacgacacacccgaagatcagcgccacgatgggaattgctatcatcgggatgttgttcgcaaagatggacagtacaataagcgtcaccagcatcactgctgcacccagcaacccgaacatacgcacgcggcgcagtttcttgatcgcctcgaacttgatgcgtcgcatcgcgtacaggtgcccgatgtgcgacaccaaatcatccttggcgtccgtgagcacctgtatccgcatcttgttccgccaattatccgtaatcattcagtacctacctgcgaggaagagtagaaggccgcttgctcctgtttcagttcggccttgcggtggaagaacgtggcccgacgccacatgaggacaatgtaagcaaccactgcgatcaacccgatcgtccagtggatgaagaccgccagagcgatcccgacgatcagtacgaggtacatgatcgtcgtgtgtttctggatcgcatccctgcacctgcccaagtctgcgatcacgtccgagtaagtgcggctcacggcagaatctccagttcatcgaacgaaggcacgccatgtacccgagactcgccgcgctttacgtaagccttgcccggcaccgtggggcgatacccccatgcgtagctggccagagcgccttccccttcggtcttcaggatgaggttctccggcttgaagtgtggcgatgccttgatggcgtcgagttccgcttggtcccacaccggaaaacgccagttgtggttgacgttatccactgtcgtgattaagccgttcagacggcccggcgtcaaccactgtttcgttgcaagatcatatgccagcgtgcggcacatgctgcccgtgcactcgaaacctgagtggtttatcaggcgtacctcgtcagtgactggttccacgatccaaccgcgtggatgggtgccaagcttgccaacgatcatgaactccgtatcctcgtcaagggccatgccctcggcggcacgggcgagcacaagaatctgattgcccactcgggtggagaaattgttgcggcggttgtcacgaacaaagatgaggttcttcattgatccgtcctcggatgcgttagagtttgagcttgatgacagtggcgtggtcccactcttccggcttgcgcgcatcgttgtcgtacttgaccatgcgcgcttgatgcaaccactcttcgagtgtgcaccagttgaggtgcaggattggaacgctggattcgatagcgtgatcctgatcctccccgatgaagtagtgatagccttcacccttcaccagttccagcttcatgccctccgctgcgatagcggcgtttactttcttgtaggtcagacgtgccatgatccgatcctcagtaggaggcgacgttgaccgaaatgcgatcaacaatgttgcgctgggcgacttcatcgcacacaagcatgacgcgcgccttgtcgtcttccgtcgggcggtgaccttgcaacttccacttggcccgaacgtcaaccacgcaaccgcacagcacgtcagcgctaacgtcgtagcccgaagagtagcccagcagcggagcaactacactccggcactggcgcatatcagccaaggctgcatcgttcagggtgggctccgatcccatcacagccttgacgctattgacgatgcgcgcgggcagcttgctcgtctcttccgagaagagcttgcccggattgacgtggacaaaggcggcgagtgcgagcatcccgcaaacaaccttggcagcggcggcgatgaattcgttggtggtcggggcagtgttcattgcattatctccgatgagtgcgttattttcaaagtgtgtttggcgtgctgcatacgacaggcacactactccacacgtacattatagcacaagtaaatcggggtgcacgccacccctgattcccgttaagctgccgttcaggttcagttcgagcaccctttgaaaaatcgaggggtcggaacaccctcgtttcagggcctatcctttagccctttcttcatcttctggagcttggcgtctagctctttcatttccttgcctatcgtcttatcagctgggttgagtttcagcttgcgctttaggtagacgatgcgattactcatcttgcggagttcctctggcatggaagccctgtacttggctacccggctagcggtctgcgtgcgaatcttgtgcatgtactcttcgggcgtgccacgagtctccttggcttcctcagatcgtgcattgttgacgctccactctgcatagttgcccagcgtctccatcgtttcgtgatccagaatcgggaagtgattcattctcttgtggatcatcttggctagacccagcgttggcacgatggcgagcatggcatccttgctttcgtgattgcgcatattgccacgccccaaactctggatcgtcttggccaccacgtaatcctgctgcggatcatactccggcatatacgcttgcatcaacgagcgcattacaggatcaggattcacgcctgccaagaacacgacggcgttggtaccgatgaaatcgttgcgcccttccacacgtccagtagagaacttacggaacagcttctcgtttacctccacgtcttccagcggtcccttgttcatcagcaggagcgccttgtccttacatttgtgtagcttacggaatcgactgacaagcttctccgacatttccaattgccatgccagcgggtccagcttgaagttggcttccttcaacttcttgtgtaggcgttgcagcttagggcctgccttagcacggttgttcttgcccggattgcgtaggaattctgagaaggtcttcaaatcccgagacgttaggttctgtgcgtctagctctgccttgatcgaagtaatgtgttcgcgtggcaccaacaggttgttggtattcatcgacttggacggcatcgagcttgtgttgagcaatggcacgatggtgactcgggaatagttctccagaatcttggcgttggcgttggcatagaagcctgtacccagctgatcgtcgatgaaaggaatggtgacattgcgtaccgtgcctgctgcttccttttccatcaggtagaacatttgactgtcctcaaaatccgctgacagaatatataccgacttgaagccttggaagggatacgatggcagggtgatacgcatgaactgtcgcttccctttggctcccgtcttcatagcgccaaacaccttcatgcgtccgttagccctttcgggatcaatgtcgtgcagaagctgcttgacttgtagaacgtacttcttcggccccattgccttaatgagagctttgcgttccgagggcttcacttcctcgttgacagccacctcaaagatgttggttccgttgaggcgcctagtgacgaacagcttgtctagcaaatgcttgaccgttgcgttgaattcaatcttgtcggtcatagtcacccacttgcgcgcctcgtcaaacagcacagtggtatgctcaaaagttggatgggatcgtagttgcaggaaggtggcgtgcgtgatgaacatgatgctaccgtgcttgtacggattccctacgtacaagccattgcccttcttccagttcagcaccgaattgacgatactcatcacattgtcgttggtactggaatcgctaccactggcaatgtagtgcaggaaggaatgctgggattctggcagcactcgctgcacactcttgaccgtctgctccagcaatttcttggtgggagcgacgtacagaatatatccgggtttctttttcgcgtggcctgcctccacatgcttccgcatgaattccacagcagccctagttttgcccaatcccggaggagcggacacaaagttgacagtcagggtcatagtgcgtatttacgctgtaacgttacagtacctttacaggatgccaaaacagggcgtttcggtaaaaatacttccgcctttagacacgcctgcgttacagtaaaatctgagcagtctgaggggaaaccgccgcaggggtcgaaaacgcagaaacgcggatccttcaatccccagcaataaaaaacgcggagacttgatgttttgacagaaattttatgtaacgtaccctcccctagagatattagacacgccaccgttacagtaaaatcgtcttttcaggtgaaaaccccaccccaaaggggccagcctttggggtggggtttcgtacccaggtacacatcaggaatctctagctctacgtttctatgaaatccccactaaggcacaaacctaggaatggctccggcctccggccttctccattcgtacaggttgttcttagggggaatgccttttcgcttacgcgatcctccctgattcagcctctagagaacgaaatcctctaaaatcaccgcgtttttcgtagtttaccctgtagctggtaagccggaggcccaaactccgggtagtttagggtccaacctcctaaaaatggttccagaacctacattttcctgcctgcgtttccggcagttctgcccttacggaaccaccccgcacgggtcaggatcgacccaggagggtcagaatgggtccagaaggccaaaatcgcctaggatcgagcatatctacgctggatgcacgctgttttctcgcaatttgagtgtacgagggcgatagaacccctcagcctaccatcacctgctctggcgttgtccgggttggggtggaaattgtgtcataacaacttacggacaacttcaactgaggaacacgttgtgaatctcattccaactgtttttgcttcacagaagccgtcccttcccagcgctgaggttgctttcgcttcctttggctgcgaaggctgcggcaaccacttctcggtgcaggccagcatgagcactccgttctgcgttctgtgtggttgcgacaataccactcgattgcaggacagcgttactgcctccgctctggatccgatcactgaagaagccaattgcgcagtagtagaatgctcctgctgcaatcagcacctcgtcatgagttccgcggtcgaagacaacggcgttgttttctgttcggtctgcggcactgacaatcatttcgtttcggaagctgcttctgacgacgatgatgaggacgaggacgaagaggacgcttgcgtcaagattggtcgggaaagccaaggccgtactgaaatcgaactggaagcggacaaggttgctgatccgcagacgttcgtggatgccaacgagccgccgcactaccgcgagtcgaacccggccgctgcgaagcgcgacaagaacaacgaagaaaaggccgctgccaagtgtgcatccgataaggatgacaaggaagaagccaagaaggaagacccgggtcttgctcatgagcgtgaacgccacggcatgctgaagaaggataaggaagaggatgcgggctgcgacgaattcaaggtcggtgatccgcagacgttcgtgaacaaccacgaaccggaaggccatcgtgattccaatccggctgacgcccataggaacaacgagaacgaagaagtgaaggcaactaagggcgatgcccctatcgaaaccatcgctgcccgtaagggccgcaccaccgatctggacaaggttgatcgctctgaactgagttcggttccgggcgctgatggccgtctgcctgagttcaagttcccctcggaagaggaggtctacaagaacagcgtggctaaggataagctggatcagaagagcgtgcagccggacggcacggacaactgcgtgaacgaagacgccttcaagggcgagcagttcaaggcagtcccgctgctggacattgtgcgtacctcgcagccgggcaatccgccgattcgctttggccgtgtcgaagcctccatcgttgcatacgtcggcccgtacaccgtcgctgtgctggaagaggcaaacgtcaacgtcaacgtgcgcgagcacttcaagactcaggcgtacctggaagccatcgccaacagcgttgagatttccggcttcgatgagactctggcctccttcggcttcgagcacctgaccatcaagagcaacgatacggccatcgccgcccttgctaatgatcgtgtcgaagctcgcgctgcggagctggcctcggctcagaatcaggcttcgctggacgaagtgcaggcgtgcctcgctatcgccagcaccggcatcaccaagcagttcttcgatgcgggcaaccccatccgagacgcgctggttgcttcgctggagaatgcgggcctgcgcaatccccaccgtattgtcgatgaggctctggcttcttcgcaggacgggtacaacaaggctctgatcgctgaggcgttcaacctgctgtctatgccggtcgaggcgcgcaacgctattgccaagaccgtcgtcggttcgcgtcacgtctatgaacgtgccaacgcgggcgtccacgaaaccaccagcaccgtcgttgcttcgctgcgtcagcctatggtcggcgtcaacgaagaagtgactgctagtgttccgcgccagagcggagtcggtagcaatgcgcgcggcaatgccgttcaccgcactgttacgcaattgaggtcggaagtgggtaagggtcgcctgttcggcggctgatcctcttcaatcaatcatttcactactgaggtaaaatcccatgttggacttttcgcagacccgtctccgttcgagcacctctcgcaagaccggtaccccgttcctcgtcaatgaagaaggcctggccctcgtcgctgacaccaacgttcaggacggcgtgaccgtttcgaccggcgctgccggtgaacagttcgtcggcctgtcgatcaccactcagctggatccggtttcggttccgcaggttgtggaagtcgtggtcggtgccaacggtcagttcaagctgccggccgtgccgtacaccggcgctgctctgttcgtcaagaatcagaccagcaacgaagccctgaccgctgtggccgttggtgctaccccgaccgccgctcagtacgctccgaccgctgacgctcaggtcttcgccaccgccactgcttcggctggcaacaccatcctcgtcgcctaccgcgtcgctgccactgtcgaactggtccgttggattcagggtgaccagctgccgggccacaacgtcgccgctaccctgaacaccgtcggcgtgttcaccagtggtgatatccgtacctcctgcttcgataccggcgctgactggactgccgccgccctgtacgtgaagctgggtccgaacggcctgttcactgccaccaccaacatcgctgaagccattccgggcgttcgcgtcctgagccgtccgtccactggttcggcttggctgggcctgagcgtcggcttcaacggttaattcattgacacacctctgaggaacattcaaatgtcgaacattcagttttcttcgcagcgccgcccggtgcgctcggctgtcgctactgacttccgcttgtccggtcgcagtgaacgccttgtcggtcaggacggccacatcaacgcaagctccaaggcggacgcactgaagaccctggccgctctggcccaggaagttgccagcggcacccacgtggtgaccgaagaggccgccgcgactgcggagactatggccaaggcccaccgcgaaatggtgcaggccgctttcgatgatccgaaggaacacgaagctctgggtgccgtgctgaccgacgaaatcaacttcgccgccaacaagcagggcttcgctcgtaagcttctgaagcgtcaggagctccagcagggccagtacccccagaccctgctgccgttccagaacgtcatgggcgtcgtggctaccggtccggtcaagtgtgaaactcagctgatccgcaaccgtcgcttctggccgcaggagttcttcatcgaagctcgcccgtacatcgagcagcgcgaaatcgatcagaccaacacggacatccttcaggacaagtacctggaagctctggaaggcatcatggtgcaggaagatcgcacttggcgtgcgatggccctccagtcggtcggtatcgtgaacccgtccaccaccatcgtgggcgacctgaccccgcagggtctggcccaggttcgcacccagctgatctcgaaccgcatcggcgcgaccaacctggtcatggccgccgacctgtggaacgacattatcggctcgcagcagttcatgagcggcgtcgatccggtcacccgtcacgaaatcgttctgactggtgaaatcggtcgcctgctgggcatgaccatcaccactgacgcctaccgtcacccgtaccaccacgttctgccgaagggcgagttctgggtggtgtcggatccgaactaccacggtaacttcactgatcgtggcggcgtcgtcgccgagccgatcggtatcgctaccgagggcgtcccgggccgtggttgggcgatgttcgagaccgtttcgatggtcatcgccaacgccgcttcgattgctctggcgcgtcgcgtcggttcgtaattcccccgacagggatagggagtgggagcttcggctcccctcccttttgaatgtactaacgagacgattcaccagtccttgtatgaaccaaaagatgggccgattaggctatcaaggatggcgtaaggctgttggtgtttcgtccctttagtacatttacttggacatgtagctcagctggtagagcaccggactgttaatccggccgtcgcaggttcgacccctgccttgtccgccaaaatctgcactggtgtgcgcgcccgacgtcgccactggcaaatcctcgggctacctcgaaaggggtggccctttttcatttctgcactccgaggacaacgctatgctggagacggcgagtgacaagaaaaagaaggaagagcaaaagctgcataaggacgtgacggaaatcattaagcacgaacgccttggtgctcagaagggccgagaggttgaattgcttcaagcgcatcaaaatagattgagacacgcagggcgctccatgcaggccgagagcctgagccctcacattcgcatcaattcagttgaatcccaagatcatagagaagcagcacagaagctcactcatcgactcaaggaaaaggtggccttcctcaaagaaagtggccgcgccgacaagggcaaggagttgcacacgcagcttgccgaacaatacaaacacttgcactattgggccaacgcaggccacacccgcaacaaaagtccgaccctgctgcgagcacgcgacgatttctacaatcgtcacatggagcatcagcggcttgcgctgaaacaataactggaggcattcatgcaatacaacaaggcacgcgaccttctgttggtcgccatgactcatccggacactggggaggcactcgcagccctccttagtgcccgttcggctcaaggctttgagtcactgcatcatgaactagaagctactagcgcggcagaatacgcagcgctggaaagtgagttcgatacggtgtacgcaggccgtaccgacaacgccgatggtactgacggcaactacccacacatgccgggcaagtacgatcacagttctaacggccgcgcaaaccctgacgacattctgaagggcaacggcctcgaccagtacccaggtacaaaggtaaccttccttatggacggcaagattggcaactcgggtgatagcccgaacgaccctgcgctctctaacatgcaggacgcagaaactgttcgacagtccaatcccgaagacgttgagcttgacgacattattggtgacggtgatcctatcgtttccactgcgccgggtgagttcaactacgcgctggatggtgaacacaacaacaactttgacgtgagtgatttcactcgcgccaacaatgatccgaacgatcaagacaccgtgcacggcatcgacgacgttctggatgatgaaagtaacgaagttgatccgcagctgcaagacattccgtttgatgacgatggtgaaaacgtagatacggaatcagagcagaattcttcagccgacgatgacggcgatgcatcggatgatcccaccatggaaaagcaaaagaagccctcctggactgaccttgaaggtcgggacgacgatgaaatggtgaacccccagctggcggacgtggacgattcgtgcttggttgtcaagcatcctgattcggtcatcaagcgccttggcaatcacctcaagtatcgccatgattcggaagacaatggtgctggctatggcaccagctacgaacattcgtccgccgatgatgatgacgtatacgatgaagatgacgacattctcgataccgacaacgaggatttcaccatctttgatgacgatccgctgtatgatccgaacgatgatgacgaggatgaagagaacgagcaggacgacgatgacgaagatcataacgatggggactatgttccggcatcggttgatcttcccaatgccagtcagtaccctgtgcagtccgctgaggatatgccggtaaagatttgggatcgtggcgagcaggtgtcggacgtggagaacgacggcgacgatgatgtacgcttgaatcaagtgcagttggctgataccgataccaacggtgaggcggacgagcttgacatttacccgccagacgttaattgcaccatcaccatcgaagggctggttccgggcgagtattggtacaagcatcgggctgtagaagatgctgcctaccacttgcaggagcaggatcgtttcgagaaggctgcatcggcattcaccaccctgcacatggatgcgaagcgcactggcaacactgaagacgcccgtaacttccacaagcagttcgagcacgcgaagcgctgggcgggtctgcacggcactcgcgctcaggaacttctgaggctgcctgctgtacgacgcaagccgctgccggaaccccacggcctgtcgtaacggagaaggggcgcaggatcactgcgcccctacaggtgatctatgaaaccccagcgagcactgattacgcagttgattcactcggtcggtactaagctctccatagcgttccaccttccggctcctgttgttactacaggcaataaccccgtacaggaattcctgcgcagggctaacggccagaaggatactccggaaactcagtatcccttcttctacttgaagccacgtgcgttcaacctgaatcgccaaagctacaatccacatcggatggctaagagtccgctggcttcccaactcgggcgcttggacgatggcaccttcattcagatgaggctggttcccacgttggtcactatcgaagttgggtacgtgactaacgacagtcttgaatacgaggtatgggcagctaattggatcgcgctggcggcttcgggtaggatagactttgacttcaagtacaacggtatcaagatgggtgtcttcgttgagttggccgatcagattgaaatccctgaaatcgaccaaggtgaggacataaaccaaatagtgggcactactaccctgaccctccacggttacgtagaaatgcccggccgtcccactgaggaaatcggcacggtgtccccgaagcttagtttttccaccacaacggccacggctgaccctgaacgcttcacgacctacgcaaaggttggtcctaaaaccactgtgagagaccgataatggcatctggcaattttatcccatacgataatttcatcaaggaagtgttcagcggcgcgctgaactactccactgataacatccaagcaatgctgcttggtaacaactacgttccggaccggtcctcgcacaagttcctgtcggatgttgtaacctacgaggttcctgctacgggcggttatgcacgacaggttctgagcaacaagaaggtggaacttctgtctccatctggcttcaccaagatcaccgcagataacatcctgttcggtgagaacgtaaccattcgagcgcgttaccttgtgctgttcaacgctaccccgactggtaccaacgcccagcaactgatgttctacgtcgatctgaacagtggtggtacggaagcggtgcagtccgccaacagtacctttgctctggacatttcgccgaacggcatctatcagattgatcccatccagtgaagactctgatcgctgggttgaacattcagacggcagatgactacatcaagaagacggcacttcgcacaatcatcggagtgcctctccccaaggaaatcgtcgtctctcagacgttggcattgaacaacaatgttcccgtcaccataacgggaagggatgattcagtcgttacgatcatttctcccgccaagccggtcaaggttacggcacgtatcggtaatacccctgtggagttccctgagagcatcacgcctctcattctcccgggcaaggttaccaatatcgtggtcacctccttgaatgttgatccggtgaatgttttcatccttcaaggagcatgacatgagtaatcgtatccttagcacttctaccatcagccgcgccgtccgcatcctgaatccgaccaccggcgacgtgcaggaaattcaggtacagcgtggtcagtacgaactgccggaaggttacagtatcgctgccgctgaccttgccctgtattccccgttcctttcgcagattgatgttgaaggaaaggtgattccgctggctggggttcagtcgatccctgacacgccgattgcggtgcccactaacgacgctgacgacaactaaggtaacttccaatggcaaacccgattggtaacaatcaagcttctgacgtttatgtcagtgagcttaacctcagcaccatcatcactacggtagcaacttcggttggcgctatggtgggtgctactacgcaaggcaagctgggccgccagttggtcagcgactacgcctcgttcaagacgcagtacggtccgagcaacccgtcgcagtctcgcgtgcacatggcggtacgtgattacttcaccaagggtggcgaaggtatcatcttcaagcgcgtctgtggtgccggttacaagtatgcaggtgtcctcctgcaatacaccgggtcgactggtaatcagaccctcaagctgacgccgtatggcatcggcggtgagaatccggctgacaccatcgacttccgcagcgccggtggcgtgtcggactcgaatcagaacctgtgctacatctacggtattggtccgggtactcgttacaaccagtacgcgatcagcatcacctccaacaacatcatgcctccgggcaacctgagcctgacgcctgcccttaccggcggcatcttgcagggtggcacgcagtacacctacggtgtctcggccatgagtgccttgggtgaaactctgacctccacccagctgaacatcacgctggagcagaccaccagtggttccgtcgtcatttcgtgggacccggtccccggtgccatcggctatcgcatctacggtcgttcgactggttcgactggcactggcactgtgtcgctgggcctgattggttcggttggtcagggcatcgtgcagttcgtggataccggccgcactgttcccaccactgttccgccgactcctgtcaactcgaacagtaaccgcttcacgttcactgacgtgtttgcaatcaacgtgtacgatctggcttccagcgtcaatgccccggtcgagactcacgctgtcacgcttgccccgagtgtcaacggtatgcagcagcagcaggaaatcgagacggtcatcaacacgcagtcgcagtacattcgcgtggtgagtaactatccgaacatgactgtggctcctccgaccatcttcacgttgcaggctgtcacgatgaacggcggcgctaacggtgcagctgtgacctcggcggacctcatcaacggttggcaggctttcgctgacaaggacaccgtgcaggttgcccagctgatcgacggcggctacgctatcccgtcggtccagaaggctatgctgtcgattgccaaggatcgtcaggactgcgtagtgttcggtgacgttccgtccgatcagcagaacgcgattgacgcggtggcttaccgcaccctgactctgaatgaaaacagtgatcgtatcatgctgttcacttcggacattcaggaaatcgatcctgacaccaactcgctggtttgggtgccgggctccggtgcagcggcaggttcggcggcggctgtggacagtcagattggttcgggtggctccatcgcaggcccgacctatggtgcgatcaccactgcggtcaagctgcgccacaactacaccaaggcacagcgtaacatgctggctggctcgcaggttaactactggcgtagccgtaccggcatcggtacgtacctcgccgagcagaagacttgctcgactcccatttcggccgtcacctactactctgtgcgtcgtatcttcgacgtgatggagcagtcgattgaactggccctgacctactcgctgcaagctccgaacacgcagttcaccgcgcagcagattgcgagcatgctgactcagtacctcaacggactggtttcggcacagcgcatcaacggcttcagcgtgcgagtggacaactctccggcagtgcgtgctcagggcaacctgcaagtgtatgcggccatcgaaccgatcctgcccatcgacaagatcggtctgctgaccatcatcactccgcagggcgccaacttcgaggaaatcctcggcaacgtggctccgggcgcaaccgtctctgcaacctaaatggatggggcttcggccccattccctttcaccatcaagaggtaattctacatggcccgtacttgggtacttcaagacctcgccggattgccggatccgcttcagccgtacaacttcgacctgtccatccccaacgtgccgggtggtggtaacggttaccagttgatgctgcgctgcgcgtccgctaccctgccgggtcacgctaacgaggatggcatcctgccgctgcgcggttcggaaatcacctatgctggtcgcccgctgtgggaacacgcgttcaaccccacgttctctgagcaccgcgatatggtttcccgtcagtcgctgctgaactggattctgtacgcacgcgacaaccgcaccagcccgactgctggtgcgtacatgacgaactataagaccattggcgacctcatcatctacgatgacattggtaaagaaattcgtcgtatccgactccacggtctgtggtgtcagagcttgcaggaagcgcagcttgaatcgcagggtagcggcccggtgatgctcggcgcttcgttccgttacgattggtttgaagacctgtaaccaatcaggcacgtcgaaggggccgtaggtaacactacggcccttttctgattcaggcactccaaaccactgaggtaacagcatggcgttctctctaaagctaccgggtgtggaagcactcggaaaacaagttgctggcttcgctggtggtgtcgccaagcagatcggtggcaatcttctcgctccaatcgctaaccttacttccggcaacggtggttactcaaaggttccttcgggcggccagatcggtgactacgttggtggcctgcttagtaacgcagccaagaacaagtatcgtgaagtaactggagacttggttaacaagatcggtagtaaggtaggcaagcagcttgcaggtgcgttgttctctaacgtgttgtctaccggctatggaactggtcagttgaaggagcttgtagcccgaggtgatccgcaccttctcatcgactggtccatcatcatgcctagcctcaaaggtgcgaatggtctgtcggattccttggttgagtcgattgactttagtgctcctagctatggcacacgccgcatccagttgggcaccactcacgtgaactatcctgggtataaggaaaattcaccaatcaacattgtctttgcggaagacactgaccacacggtatcacagtaccttaattggtggcggtcgtgtattcgtgacgttgacggcacttactcctatccgcagtcgtacaaagcggacatcaacgtcctagctctaactccagatggcaaggtcgcagcgatgatgactttgctcggttgttaccccgacggtcccttgtcttatccgtatgcctcgggcacatctgaatacctccggttgcatcagtcgttcgcatgcgaccatgttgccttctcgtaccccaactcgggtacggtgagtgtaggtaatgcacagacgattcccagtacctgagcatcctcaagcaaataaccaccacataaggaaccaagaaaggtaacgattatgcgtgagattgcagcactcagcaaagagacttttcgtaactggcccatcgagcgtcgggaagcctatctcaaggctcacccgaacagcaagttccattaccatgaattgattgagcgcaagggcgtcaagctccctgcgaccactcctaagcttggtacaaactgggctgagcacgcacgctatccagacccggatcaccatcgccgccacgcgaaggcacatgctatcgcggcggagcatatcaaggaacaggcaaagaagcaccgggctcatacccctgcctaccatgatttgctggagcaggcatccctgcgcctcaaatggaaggaacggcacgaaaagctctacaagaagctggccgacgatctactgaagtaacactcacttgatttcctggactacaacccatgacctccaagaacgaactgcctgcacgcaagcgcaaacttgcgttcactgttaccaccaagacggcggaaggtgagactattgccgaaagccgtccccgtcaagaccctccaaagccagctgccccgccgccgatgggcggtcagtcgggcggccgtatgaaggtagcactgcctactgtagcagaggaagaacgcgaagccactctcgccgattcggactcacgctatatcgaaatcgaccacctgcctagcggcggtgtgttctatcccttcgagcgtctgagtattcgccgcctcggcgtacccgaggtacgcaaggcgtatcaggctcacatgaccaagagcttccgcaccttcgtgcagattctcactcctagcatcgaccgcgatgcttactcgttgaccattggtgatttctggtacctgatgtacttccatcagagtaacagctacccgaagtctcctgctaccatgtcgtttgagtgtatgggcaaggagcatctggagaaggtcaagaacggcgaacttgagcccgaaaccctccgtcagaagatggaagtgcgctacaaggaattgaaagagcattccatcaacgaggaaatcggttaccagcttgctgaactgattagtgaagtacgtgaacgcttcaacgttaccctgtatcccccgacggttcaggacacgattgaaatggttgaagaaatggaagcgctcgatgagaaggctctgaacgcctcgtcttcggacaagcttgctacttcggctctcgacttcgtgcgcaacaagagcgcatacgctgatcttgaatggatcaacgagtacgcctcctacctgcacccggccatacacggcacttccatcaagcagcgtagggagttccttgattcgctggacaacgacatgcttgaactgttcgattacatcgaccgcttcaagaagctgtcccagcacggcattgtggaaactgtcaaaactaagtgtacggtgtgcgcggctgagaggatggttccgacctccctctcggccgccatgtttcttcccgatctacagcgagcaaagcttgcttgaaatgcagatgcagatcgaagcttacctaaacgtgacgattgacaaggacatggagttccgtgccttgtattatcgctacgccaaggtgaaagaagaactgcggaagcaagaggaagaaaataagcgccgccagcaatctagaggacaacggtaatcatggcaaagcgccctcctagcaagcccatcaagggcaaagtcaaaaccaagctgctggatcagccgcctgtacgaaaggccatcccgaagactgccggtagggccttgaacaacgacaagatcaaggtatcggcgcagttgaagaagcctaccgaagctgcgaagcgtgctgccaaggcgaacaagaaggcaatcgtcaagccggttccaccccctatcgacccacgactgctaggtaagaacgggcgcccgcttgtcggtgctgcactcaagatgcgccttgacaagatcagggccacgggcgcacgccctcctgaatctccgccgcttgataagaacgggcgtccactagcaggcaacgcccttcgcatgtggcagatgaagaaggaccgggagtacgccgctgcacgtgagcacgcaattcgcaatctgaaaatcactgcacctcaggaagagaccgatcctatcggggtggccgcagccgcttcaattcaacagcagctggcaggcgaccttgacccggaagagcagcatcgacttcggcagatggaactgcgtgatcgcatgcgcatggccaagttcaacatccgagtacgtgctcgaaaggctgctgagaagcaacagcagatggccgaacaagctcagatggaaaacacagcgcagtctatgcgtgaacgtgtggaagagtggcgcatcaatcgaggagacaactacgcagcctcggactacgagacggaagtggcagacactgctaccgcgctcgacaactggactggccctattgtccagagccctgctgacattgaacacccgtccgcaccttcttctgcaccccgacgtcgtagtaagcgaggctggcgtcctagcagctggcaagcacgtggttacccgaagccttgggaagaccccgagcaggttgcattgatggaagaggctggcgttccaccggactccccgactaccaacccgcgccagcgcgatgagaagatcacgcagagcgaaattgaagcggctgaaaagatttccgaagtcattggcgacaagatcgaagaagtcatcgaaaccaagcgctctaagcgcaaggtcgaagacgcagaagcccctgatgatccagaacacgtcatcattgaaccgaaggacaacaaggaattgttcaacggtctggacaacatcggtaacgttggtcaggacttggcagacaccatgtccgagcaattcaagcaggaggaacgccaccgtcgtcgcgctgaattggatcgtaagcgcaaggctagcagggatgacgatttcggcatgccttcgggattccgcaacgcagctgctatcgctgccgcaggccccaagcagcttctgagcgaagtcggtaacgtgctcaagagcctcgttggtgttggtggtatcctcggaaccctgtgggcggttcgtgagaacttcgaccgcgctccccgagtgatgaattctatcaccaagggctttaagggattgatggcgagcgcttacgacttggtaggtatgcacgatgaagcagacgctctccgtgcagaagctgacgcgattcaagacaaagaccttgcttcgggtaaggacgctgctgtcgttggtggtactgttgcaggtgcttcattgtttacgcgtccgggacgctggcttgcaggtaagctgatgcgtggcggctggcgcgcaggtggtagtcttctgggccgtgccgctactctggcacgtgctaacccttgggtggctggtgctatggccatgttccataccgaagacctcggtggtcctgaacgtgctgatggtactcgctccgatgaaatgccactggccatgccaatgcgtactccgcagcagctagaagccgacttcaacagcaccgatcctaagcgtcgtgaatatgctgcgcgtgtgcgtgttgcgcagaagtattgggatgacaagaatcggacgtacaccgtagacaagggcgcgtttgacgcagaagtaagggcgctcttgcgaggcgatgatacttcggggtggaactcggcacgtgcttctagtggcgcaggtaacttctctatctcacaaggccaacgtgaccttatgagcggtacgtaccaagctttccgtaaggcgggcctctcccatgagggtgcactggctcacacggctgagattggacgggaaggtgccttcctcggtaagaacgtattcggtagtcatgtcgatcctgctaatggcgcgaccaacgttggcttcatgagttggcaaggctctcggggtaaggcacttatggcccgtttgcagtctaagggaatgctcaactctgacggtagcattatcccaagtcaggcagccctagatgaaatggctcagttctccgttgatgaaatggcgaatggctccaaggatcagcaggcaactcttgattacttgaagcgtgacaacatcagttctaaccgggcgatggatatgcttggcgagaatcacatcaagtggcgcatcaacgatcctaagtaccgtgcttcgggtatccgtaatcgtactggctactacaacgaagccagtaagctcatgggtcagggcaccatgcagcagattcctaacgaggttactccgttccagtccaaggaatcggtgcagccccagcaagactggaatcagatgaagcgtgatatgggcctcagtgcaacgccgttcccctccaaccgtggcgaaatgcctagtcttagttccagctacattgatgacatgctgcttgttggcatcaatggcggtctcatcacttgaggtaacacatgggattttctatcggcggttttgtaaagtcggcctcgacttctgtggccaactacgccaccaacactgcaaagggagcgatcaacaaagcttacgggtctgttactgaagcactcaaccgatccatcggtattggtggtagcccacttgagcagcgcaagttggcagatcagaatgcgagcagtgaattgcagcaagcctacaccccgaacgccgcgtatcaggttatcttgagcgcggatacggataacggcgagcccctaatcgtctccggctggtatggagcggagacgctcaacttcagttttggtggtagctatgatgcaccatttgctcagggcctcctgagcatgatgggcggtccaactctggaaaccattgcacgtctgaacggcgtgcagtcggttaccaaagatatgactgcacagatttggcaaggcgctacccgtatcgccgtggacattccgttggtgatcgcagcacagtacgatggcgagcaggaaatcatgcagaccatcaacagcttggcccgtatggcactcccctctgaaactgaaagtggcttcctccgcgccccgggtcctcgcccaaatctgaatcgggcagttgacaacattggtgacaccttcaacaacatttccactggcttcaaggacttcgctaaggaagctgcttcgggtggactcaataagcagtccctgacgcaggttctttccggcggtcccaatagtctgcttggtgcgagtgctgaattcattggctcgcccgtgcgtgaagtggagggcaacattgctttgaagatcggtaacatcctgcacctagagagtgtggtggttgagagcatcagtccgactatcgaatggcagttggatggacgaggtaagcccatgtttgcaaccatcaacattcacgtgagtacgttcaaaattcctacggcagaggaaatgaccaacatcctcatgctcagtgctcccactcctagccgtgcgcagaaccagcagtctcagaacttcggttcgattgacctgtttggcaacaacatgcaagatttcatcggagggtaacgcatgaaccagtacaagcagcgtacctatatcccggtgacgactgttcctgtggacgtgaagggtagcgagactgagcagctgctggattatctggcaagctcgatgaacaatcctcagttccgattgtcgaaacagattcctgtcagcactcctgaaatgattactccgaaatacgagttttcgccggagatcatgagctatgacaagtacggtactgagtatctgtggtgggtgctatgcaggtacaacggcatcatccatcccctccaccccatcctcggcttcgtcgctggtaattgggtcaacgttcctagcgctgctgacgttacgcagtggctcaagaacatcggtcttgaccagcaacaaatttcccgtctagtaagggtctaacatgctcaagtatgacaacgggctggaattggacgttaccattggtggcgtccagcttcctgacaatgagttctcgtttcaccacctgtccctagtcagtgacactcggtatttcttgccgatgatgttcatgcagttcgctgaccaaggcgacattcttcggaaggctggcgttaccctgtttgacgccgtacccattgtcattagcttgggcactggcgatcagaaaaggaactacgagttccgcctccaccgtcctgagcaagtcaccagcggcaacctgaccatctacaaaatgagcgggtatctagatgcccccaagtacctagctgagtctcagaacattggctacacgggtactagctctgaaatcatcagtcaaatcggtgaacgtagcggcctcacgccacaggttgaggataccaccgacaaccaacgatggtggcaggccaaccgccgcaatgctgagttcgttcgctacatggcccagcatggatacaagtcagatgattccctcatgtgtacgggtgtgcgcttcgaccgctccttgcgatacatggatctaaacgccatcgagccgcgagatatgtggctgagttacacaaagatggaccaaaacgtcgttacaatcgttgaccaccgatttaacgatcctatgggtgggaataatttgattaggggatacaggagtcgcacggtagatcagaaggtgaacactcccgacactaactacaacgacaccaccatcaatccccgtgcttctaccgtgagtatgaacctggacctacagtctcagattcagcgtggcaaggtcgagttctcaccgctgtacgctccgggtcaggtgcacgataactgggccaaggcccgccaccaaaacctgcgcggtcgctacctcaacaactcgatctgcgttgcgctgaccactaaccaatctaatctggacctgtttgatagcgtcaagatcgacagtagcttgtcgatccgagacaacactatcggtgacggccagaacaacagccgggaaggtcagtacatcgtggcaggcaaggaaatcatgcttgtcggtcgcaactacggcgagaagatcaaactgatgcgcggcggtatgaacggagagagtcaatgagtatcggtatgggcgtccgtgaatcggacagctacaagggcattattttctatggcaaggtagtggacaacaatgaccccgaacagctacggcgtgtacgtgtccatatccccgaggtctacggtgatacccctcccgaggaattgccgtgggccttccccaaatgtcctcctagcggcactggccaaagtagcaccttcggtagctacggtgtgttggacgtagacagcgaagtatgggtggagttccagcaaggcgatccccacttccctatggtgattggcgtagccttgcgcgccgaccttcggaagcagactgagctagtcaactatccccaccgctacggccttgacgattccaagggtaactggatcatcgttgacaagctgacaggcgacgtggagattggccacttctctgatacccgtgttcgcatcgagcctaacggcaacctgcacatcacttcggtagccaatcaaacgatcacggttgaacagaatcaagagaccgaaatcaagggcaacgctacagtgcaggtgaaaggtaacgtcaacgtcaccgtgaacggcaatgcggaaatgaaggtcgatggggctatgaaggctaacatcggtcagaacctccaagctactgtgggtggtagtgccactgcccaggttactggtcctgcaactatcaattcagcagtcaagatttcgctcaacgcaccaacggtaagtatcaacggagcataagatgggaacgatcaccatttcagtgacagagcctttgcctacgttcgacagtctgtatcaggcaatgctcccgaatctgacgttcccgccaaccgggttccagtggcctcccgccctccccggcatccctaccatgttcccttctatcagctgccctaacatgagtggcgtcatggcaatgggccagctgatgaccgaacagctgcttacgtctgcgttcatgatgattaagcctatctcggaattcctaggcttggcaatgtctgccattcccaagattcccatcctgaacattggcgtagaccagctgctaactatgtcgggtgacgatttgatcgcggcagtaaaaggcgcaatgccttcgctacccaatctctatttctctctcgacataccggacatcaacatcgtgcagtggctgacgcagctgaagtctagctatctaatgtcgctagctggatacttgcaaaacatcatcaagcaggtgacagacaagatcaaaattccgggcatgcccacgttgcctaccatccccacgatggaggacgtgaagcaaatgctgatagatcagattcctcctccgatcaatgaccttcgcaacgttgacctcaacgcgctgttggccaacatcagcatcccaggcatccccttcgatttctcgttgccatcgccttttatccccaacatttcgatgcctgagattgatttcaacgaaatgatttcggggctgtacaatagcatcgtcatgatgccgatgaagacaatgcaggacttcatcatggacaaactaagtagtgtgatttccctccagctgcctacgctggttttggtcattcccactattgaaatccccattccggaaatccccatccctgttatcccgccactgcctagcatcccggacctgcctccgctcaccattcgaggcccttgaaatgcctgtatctaatccacctaccttgttgagtgtcattgcagagttcggaggccctaacaatcttggggcctattaccgcaaaggtccatacgtacctgacggtcctccgcagaatgccaacatcagtgatacgccgggcggtcttcgtctcagtcagtttgcgggtgcggtcaagtacaatctcagtgcgtccctgaatcgcacgaccgccaacaccagtggtagtggcaacagccagtcgggacgtgtcctaactccacagctgattgtttaccccgttaacggcagcggcaactacagctactactggaactacaccgcaggcgtccctgttagcggaaataccagtagtacgttccagctgtacgctgatctcaacaatggtcagaacatttctggcaacggtaactgcgtggttaccgataacgtcactggtcagaatgcgatccctagctttacgttctacctaagctggacgtatgaacgcccacccacctgtgttgtcatggaagcatacctgcacgatggaaagcaggcaggcatgtacaactccaacgatcctctgctgttggtcgatccatacgcaaggacttcggagacgctgaacatcgtagatgcgcagaccttcacccgagagtgtgtgaccttggttactgccaatggctcacgcctaacgtgctccaccactgcacctattccagtcaaagccgactcggaaacgctggttcgtgcggtggatgctctaggccaccacgttgctactaccacacgccctaacgacgtgatcccatcggtcacttgggataaggtagtgcgtgtgctgcctgctggtgagcgtgctgtccgcaatatctacatctacgacaagtgcttctgggcttcggatgacaatcgttcgttcatcctccatcacaacacgactggtaagcagatcatatgatcgtcaacaaagaaccacgcaccgctactccgatgaattggttgcctacgtactacctcagtcggatgtttaacgcagaagagtgcgccaccatcatcaaggagtcagaggactccggactgtttgtgcaaggccgcaccattggcgacaataacgtgactgtaacagagcaaggccgtcaggtggccattatccgactggctggaggtacgctgtacgaaatgatgcgccaacggatactggaacggctgcctgacctaaactcctgctatcagtttgaactgttcggcgcagatgaagtcttcaaggaaatccatatcctgaagtacgtggaaggtaatttccacggtgaacatttggacctcgccggttacgaggaaatgtgcaaccggaagctcagcctcatcgtccagttgaatccggattacgagggcggtgaattagtcctctacaactcttatcccgagaaacctctgaccaatagcaagcaggctggcgacgcagtggtgttccctgcatggatgccgcacgaagtaagacctgttgactacgggactagatacgttcttgtggtttggttgcgaggccctaaatttagatagggaggtactcatggccgtatcaaacccaccaacattggtgagcgtgcgtaacgaattcggtggcaacggaaatctccgtgcctacacacgaggcggtggccttgttccagatgggcctgcgcagaatgcgaacatcagcaaaactccggacggtttgcggcttagtcaatttgcaggagcaactaaaatcactgcacagttgaccgacatttatgcgcagcagtcctactacggacaatcgggtcaagacaacactgcttctgccaccatccagtttagtaccgatggcaacatctactacacatggggtatgggagctttgcagacgtaccgatggttggctggcggtaatgcaagtgattttgacgtagaaggatttaatcagcagatcgcaggtaacggtcaaacctcgggcacgatgaatcgtcagaatttgggtggttctccccgatggtcatgttccgctgcaacccgatttggttttgttgattcttccatgtcatttggctgccgaatctaccaagcgggtactggtaacgttatcgctacagcgaatttcagtatttatgccgccgcctcagatggtagcatcggatagcaactccatcttctagtaacaaccaaaacgtttgacacaacaagggagaagaaacatgttccaagaaagggaccaaactacagccaaatggaatcccctctgccacgaacaggtcaacttgattaactcttcgctgatcgcgcgcctcaaggcgaaggcagatgagtatccggttaacccttacggttgtgggtgggataacggcgttccactggaccttactgcaccaacggccagtgacgcgtcgccagaagctgcgttgattcacgacacccgaacactcatcgcagaatgcgtccaccgcctagcaggcttctatccattcgatttgtatttcaaggatgcggcctttgttgttcctgccccacaaccttcttcggtacgcttagtgcgactcgctatgggtgcgaagcttaatccgccccacgctggtacggcggttgctcccggcgccacgaatcgcattgatctgaatacgcatagtcaggctcatcagaagattcatatgatgatcccgctctctgcttacgaaggtaacgacgtgttcttccccttcttcgatccgaacttgcaggaatggaaagacgtgtcgcccaccatcactaacgcacgggctgactggacaggcatcacgttgtcatggcctgcgtggcggttgtgtaggttcagtcccgtcgaggacggcgaagcctacctcctgctagtcacgttgtacggacctcgcttccagtaagtgcccacatctaattcggaaccaacatggcaaccaccaacaacatcctgtttagtgacttcaacacgctagtcgggttgaataacaagcaagccatcgtcatcaatgatgatgcagttgccaatgtggtgctcaacattgttctgatccagaagcgcagccgtaagtttcggattgggtatggagcatcaagtcacttcttcctgcaaaagcaggtgactgctgagaacgcggagaagtacaggatgaccctctaccaagacctgaccaaatgggccgggtctgtagccaagtttgatatggcgggcatccaagtgaagcctctccagaattacgacggttacggagtggtcatcctgtacaagtccaacctttcgggttactacaatcaggtttcagtccagctgccgtccacctcggtggcacgctaataccgaaaatagggccaaaataggcccacagcaccctacccacagggcgccaaatttagaggctccagcttccatctacgaccccaatccttgcgtcaaaacgcatagttggggcgtagattttggctacattttccactccccaaccctcattttcctatggccactgaccggaattcaaccatgacaactgtaaccgcgttgtccaatatccgccctgacttcgatgacattgcagcacagctgggatcgagtctgacgcgcaaggcgaactgggctccgctgcttcctactcagactgcaagcctcttgattgaaggcgtggccgccgccactgcgttcctgcaaaccggtgtgcagaacagctttgaagaaacgttccctcagaccgcccgtatgccttcgagcctgcgggcgtctgcgcgtcggctcggtgtccgtctgacgcgcaagtcccctgcacagactcgggtacggctcacgcgagccaccgcagccacgtccgtcctgatccctgagttctcggccttccaagcgccgggtgtgtctctgttcaaccgctctgccatactgttccccgtcggtaccctctccgctgaattcgacttgtacgaaggctttatcactcaggtttcgtacacgggtcaaggtgctgacagtcagatgatcgttgtatctgtccccggcttcaccatcagcaacatggacgtgcgggtcactgtcagtggccgtccgctgcaagtggtgactgatggcatctggcactaccccatcacgaacagtggcgatcctaactacgtggtatcggacaacacgctgcctacgggcgagcttctgcttgagttcggtaacactcagttcggcatgatccctcagcgtggtgcgcagattcttgtgtcctatgctgtgaccaatggtacctccggcaacaacgtacagtttgagaatcagcgcatcacgtactcggccaacggtgttgagttcactggcagcgcgcttactccactcaccggaggtactgacgaacttgacgcagagcagtaccgcgatagtccgttgatctacgcgtcctacgagcgcgcggttgctattccagacatgcctgctattgctacgaagtatcccggcgttgtcgatgccatcttccttggtcagaaggacattgctccgaacctcaaggaattcatgaacgtcgtctacacttacgttctgatggatacgggttctcagatttctgctgcgcagtacacggacttcctcaagtggtggcagccgcgctcgatgcctcttgaatacgtccgccaaaccgccaagcagattgcagtggacgttgcaggcaccatctacatcacgggtcagggcgatccggattccatcttggccaaggcgcgcgcagcagttgccaaactgttcactgcacgccaaggttacttgggtcgcgatctgtacgtggacgaccttattgactccatccgtacttcggacccttacgttgaccacgttaccctgacttcacccaccgctgacgttatctgtaagatcaacgcaccgcaggcccctactgttaccccggctactggcggtacgctccccaacggtacgtacatctattcggtgtctgctgtctccaatctcagccctgtgcaagaaacgttcgcttcggtgaatggtgcggtgacgctgacgggaacgaacaacgccgcacgtatcaagtggaatgcagtggcaggtgctgtgcaatacaaggtgtacgggcgcactgcttcccaagaaatgttccttctggccacggtcagcgcatcttctgcgcttgaattcttggacacgggttctgttactactggcgctgctgtcaacaagatcaacactgcgggtatctcttacgttaccctcaacaatacgaacttgcaggtggcgttcactgatcgagtaggtgtctgatgactatctataacggcgatgatccgaatatctcgttgcctaatgcttcatccatcaacccactaatcacctacggcttccatcaagtctacggcaagatggacgggaatggcgttgttgtggatacgatgggcatcatgctgccagaaggtttccgtgatattgaggtgtggcgagacttcgctgatagcgtcgatgagataatgaacagcgagattgcaacgcagatcgaaagcctgatgagcacgaacgacccgtatgcgtcttcggtgaatcctgctatcgaccgccgtaccctcctgtacctcattggtgcaatcggattcaagtacaagcaaaacgacgtgtttgacattgatgatttgaagcggttcgttcggcatactccgcaattttggggtgagaagggcaaccgcttcttcattcagtacatgagctatgtcgttaacgcccagcttcaaatgcaatacctgtggacgcaggactacaaggtgttcgtccccgagggtagtccactgattggtcgccctgtatgggagtccgcagtaaatgccactgccaacgtggtccccttcggtacaggcgatggtgctcagactgtgttccccctgatggtgatgaactccaccatcgacagcgtttcgggaacccctacgatctaccgcgttgactgggcagggcaaacgcgcctatacaacacgccacgcaccaaccgcattaggcgtagtgttgaaatcggtagttctgcttggtacaacgataatcccaccaacctgattgtgcagaccacttcggcgtcggcacctgacggtagcgcgactgccagcgtgctcaaacctatgactaccggcgctaacgcaggctcgcttcttgatggtagcgcagtgacgcccggccctgtgacctgtagcgtttatcaatcctccgagggattgaccgcaggacagaaggttcggtacgctctgtggagtgtggactcaagcaacgttatcagtctagtgggccaaacggatttggaatggacgggcactcagatgcgcgtggccgcatacagtggtcttgcctccagtgtcctgcaatccttgggtgatggttggtatcgcattgagtacacgggtacgactggcgttggtgctcgactctctatccagcccggcctaacccacaccaatcctgttacggtgtggggcgctcagttggagcagggtagctctgcgactcgcctcatcaagacctacggcgttgaagtaaccaccacggatttcgcctttaccaacaataatcggagtatcaccctgtcttcgccgctccccgttggcgcgagcctcagctggagcggaacgtacaatcaggcaggcacttggtatccaacaagtcacgtatacatcgtctacgacgttgataagttccgaggctcagtctcgaataatttcaatagtcaagacagcttggctgcatttttctacaccatcgctccaattgaactggtaatccagtccttcgtgctcaacgtcaactttgatcctacggttctacagttggcaggtgacgtgcagattagcgtatatacgccgatggaagtggaagctattactccgatgaacactagggcttgaccatgacccaactttacatcactgaggcaggcatcgctgctgccaactcgtccagtcctaacggacctatgatccaaatcgtgtcgttcgccctaggcagcgattacggatacacccctccaccgtcctccgtgtacccgggcgccaacagcgtcgttacttcgcagagtgcgctacgcggcacggtacgctatccagttggtactcagcgtgccgtacccagtaactaccacctcgccgctgatggtatcacaggcgtgttcacgctagtggtaggtctggacgtgggcgacttctcgtttggtgaagtcgcactctacatgcccggcaacgtcatgttcggtattgcagttcttcctcaactgcaaaccaaactgactaccacacagagtcagacgggcaacatcatcaacatgacggtcagcttccagctgaacggtgtcaagcccaacatcactgtgcagaatgtcacgaccgcactggctgatattcgcacggtcggtaccgttgacgtgatgagtcccccttcggccagccctaccaacaacgccatttctttgcaggttgatgaatacaaccgcagcaacttgatgacgaagcgtgacaccgacctgtggcagtcccagcagtatgactggattgtacatgaaggtgttgtgcaggtatcgggcgacaagactctgagtgatgcgactctggctacgtcgcctatctacgttgcaccgggccgctacattctgcaattcaccagtggtgcgttgaaaggtcaggttcgccaaatcacagccttccctgtgtgggctgcaagtgtggttcgtcgcgtgggtgacgttattcagcctaccaacaatcccaacgtcctacttaggtgtactaccgctggcacttcgggtactgcacagccaacgtggaacactggcacttcgggtgccaccactacggatggcacggcggtgtggacgtatacgcccaacagggattctccgaataccacgctttcgtgggcgggctctacctcttccaatgcgctgaacggcgttacctacgctgtgtaccgtgccgcatctttcagtggcattcgtcagtacatcggcgaatacatgctagacgcaatgcccatcaactattacaaccaacaccactgaggatttcccaacatggctttcactccttcctccggcgtcctcggtcagatcaagccctcgggtgccactgagactgttctctacacctgccctgcggatgcacgtgcctccattagtgtcacctgctgcaatacggatagtggttccactactgtaacggtcaaggtaaggtcaggttctacctccactgctcttgtgagcggcgcacagttggcacctgctggggaacagggacactcaatcgacattcgcgctctgattcttgggccgggccaatcggtagcagtcactagcttcagcggtactgtagatttcagtgcaatcgggtacacggcgccttccaacgtcgttgcgttctaagaggtgaccgatgattacccatcaggatacactgttctccaacatcctatacggaaataattggagtgcagctacctaccaagccgcaaatcggttcaccatccaaggtgacaagcgaacttcgtatgaggtaggtacccaggttcagattctcacgtctgctgtagctactatgcagtacagctacgttagtgcagttacgttcgcctccaacgttactacggtgacggtgagcgacggtctattcgcttcgggtcagaagatcaacgttcgtgcatcgccgtttggtgccaacaacatgcccctcggccgacgcttcaaagaaatcagcgtgttcggtgcgaacggcctgacgatctcgaatgcgagtccgaagttcaccctgttcgttgaaggcgttggtgcgggcaaggtcaacacgttcactttccagccgggctcggatggtatctcgttcaaggttggccgtgatgcaatcggtctcgatgccatgcgcattgacgccacttcgactgccatcaccaaggtgacgttgttctcgccactgacctttggcgcaacgtacacgggtggtctgacttccctgaccgatcttctgacgattggtcagtatgcactgacctattcggctacgggttcttcgaccggcagtaaccgcctgtatgtatctggccctaacggtggtgagttcaccgttggtcctaccaatgatgctcaggtgttccgtcgtattcgactgcgcgccactgacgttgtggtcgagaacaatcccggcggttcctcgcaagcaggctcgatctggcatagcctcaacttcgatcctgacacccgtgttaccaagggtcagaatggttcttggatggattcggcttacactgcgatcaacaaccttaacaacgctcaggggtatttcaaccagtgggcatcgggcgccgcacaggctcctgttgcaggttcgacgggtgttgtgcaaaccatgcacagtgcgggtggcaacaactttaaccctgtggctggtgcttcgctggtgcagacggcttatgtcaccaatggcaccgcacctgccctgtatgtgcgacgcaacgtaggtgcttcgggttggtctgcatggactaagctgtatacccaagcagatttctcgcttggcgattacgtcaagatcgcaggcggtgataccatccagtccccgatcactgtacgtactgccttgtccgttggcacgactgcggatgcaacgtccaccctgaacttcggtacctcggccagtcccaacggtcctgctgctaccatttctgttacgggcggcgcagcgaccacgggtcgtggtgcaatgactatcaacgcgcagtccatcgcgctgcctgcactgaacgtcaacggtacgatgaacgtttcgggcgctgcttcgatggcgggcccactgaccatcactactggctccatactgctgggtaacggcacgtatggggaatcgcgtattagcaataccttcgacgactggtatttgtattccagtcctacgggacttggctggtacagtatcagtaagggtagtgctttctcactggacaagaacagcaaggcgttcacgttcaatggtgcgggtaccatcaacggtcagactaccatcaatggtggtctgaacgtggcgagtggtagcggtatcatcacttcgggcaacgttgttggtgccaacggcaacttctccaatgacgtgtttgctccgggcgctttccgtggtgctcgcctgcacatttacgcaggctgcattgcctacggtcagggcttcctgcctagctggaacgactacggtgatggcgcaacggtcctgactaacgcacgcggcggtggtacgggcggtttcaagttccgtcagatgaatagtgacggtggtggtcaggttttccttgccttcatcaacccgaacggtaccatcggttcggcgtcggacgaacgcatgaaggaattcggtaaggtactcgacctgtctgacgctcttcggttcatccgtgagcagcgagtcaagcatatcaagtggaagcacaccggcgaggaggatattgcgtttggtgcgcagagcatcttcaagaccactaggttcctggcccactatgacaagggtgctgacttctggcagctgtactacccgaaggtcgctctgtatcatcacgaagctctcttccatatccttgaagtgcagaacaatcacgaagccgacattcagattctgattcgcaagaacgaaaatctggaagaggaagtgaagcagctgcgcgaacggttggattctctctaaggacattgggcacagggacgtgctccctttttaggtagaggctatgtggatcacccctcagaatcaaactcttgatgacacgttcgatccctactttccgggtacaactcggtggtatggttataccggcatcctcatcaacaacacgcaagacacctacgatcggtacgctcctttgcagtatggcaggcaagctccatccacggcgatccttgcgcagaatcaggtagacctgaatcagatttacgcagcccgaggtacagcaggctacctgcaaggtatctctatccccaattgctacgtaggttgctcgggcgttaccatcaacgatcttctcgctgcgcgatgcaccatcatcatcaagaacgacggtacgtggcagcagtggttctattccaccaactacaagacggatagcccgggtgcgtatgcacctcccaatcgcggcattcctcgaaccgaaaccaacttcagcaacggacgcatgaacgccgctggtaactgggcacagattccgttcgctggtgtaggtaacaactacgagactttctgccacgctccttgggccccctacgaaagcaagaacccacccgatctggattggggtactgccgatcactataatcggtacgatggcgcactcatcaactatatctggcacaactttaagggccaaggacagttcggtagcgctagtgatccctacgtggtgcagaacactacacagaaccctaatgaagacattccagatggtcgggtatatcgcatcgaccgcgatattcggttcacccttggcttgactgcacagggacgcaacaacgttcgttggaactacgatgacaacggtgctctgtcatggtacaaccgagccaacttttcggtgtacattcagacacccggcggcggtcagcgtgtaggtgccacgtgcttgatgaccaatgagattcgatggaacgcgtggaattggacgggtggtagcgttggtggaggtggcggcggaggtggcggcggttgcgttgctgctaccagctatgttgacttccaaaagaccgcaggcacggttgaggcgggcgactatctgatgggcatgactgatgatctgcaattcatggagctacatgtcctgagcgtgcgtcgtcaagtacagccatgtgtccgactctactccaagagtggtgtcacccttgtgtgctcaaagtctacgccgctgaccctacagaacggagactgtgtgctggcaggcgaggcacgtgcaggcattaagcttccggtacgattcttcgctgctgatcctgagtgggaaaccatcatcaagatcgaggaggttggcaaccgagaagtgatgctcatcaactgcggtggacagagctatgctgccggtgagttgccgggccgttatatctacacccacaacaacaaccagcagaagatgtgatgattggttctgaccaactctcagaagtaggtgtacctgtcggagagctctccattgggaggactctagacgtatatgcggtggacgatctacactcggtcatccgcctgaaaggaaccgtctcaaatcgggtcctccgtagtgcagaagtagtcaccatcacaactgcctccggcgcttccgttgtggtggctgcccaaagtcgcctccctgtctatagcggacagacggcgctggctaagaatgttggtgccaacatgattgctgtgatggcccctaatggcgcttttcggtgggagcgggttgacaccatcgaggctggtactgaggccgtagtggacctcaagtgtgaaggctacatagtagccggtaacgatcctaaaaccgggctaatcttggtgtctggatcgctgtcgtgacagtcaattttacgtaaggacataaggctacggatagcagcctcacataaagacacttcccaacaaataaggaacgatcatgcaactccaggttcttctctcctccgtcgaagctctcaagtacgttgccggcctgcgtctgcctgctgtcaaggcgttcaaggtcagttcgtacctgcaacgtgctcaggtccacattgacgcatggcaggcaaccggccggactctggcccagcgccactacggcgaagaccagcagccgctgtctcccgaagatgccgtacagttcaaggcagccactgacgaagtgcttgcttcggatgtcgaagtcgataccgtcaagctcctgagctacccggcagacttcaaggaggaaagtttcatccccctgaatatggccatcctgtctgagcactttgttgacgttaccaagcccgaagctactggcgtcaccaagattagtcggggtaagctgattggcgcttacatgtctcttcaacagttgggtcagcaggaactgccgaaggctgttggtgagaatctgctgttcaacctgatgacggtccgagacctactgaattcgttctcggagcgcgacgttgaactgactaagcagggcgatgcgaaggctctggaggaatatcgttccgaggaagtggaggtcaacttctatcccatcaacatcaatgcgtttggtgatgttgaagtggctccggcacttctcgtagatgccgcgtggctcatcactgaggaatgattcatggctgagtttgacattgcctataggcagcagaacatcgagtcggatttgattgatgatcctactgaccctggggctgtgacaaactatggttggaaccttggctccctccgcttggtgggagtcgaggccgactacgaattcgtcaagagtatgacggcggcaactgccaaggaattgtatcgtcagtatttctggcatccactttggaccgaactcaaatgtcagcaggcggcaaacaagctgtttaccctcgctgtgacaacgtgtgcacccaacaacttcaacttggctactcgctgtttgcagagggccttgtgggcatcgggcgcttacgtgcatgaggatggaaagcttacagaggatgtaataagcgcggctaacgccgttgagtgttcggccctaagctctgccatgcgtagtgaaatggcctcctactacaggacgcttaacgcggagtatgaactgagggtcaagtacaagctgcccgtggtagtccccgtgaatcgttacattcgcgtgtggcttcacaactcctatcgttgaagaggatggcatgaccatgagcacggaaaccgttctgatcggtcttggctgtctacctgataacgctcaagcccttgagggggcgtgcattcggtacggcatcgagactacgtggcacaagtccattttcatcggacagatcgctgtagaaacaggtggcttccgtgccacccgcgaaagcatgaattacagcgttgaaggtcttatcaatggttttggccgtcaccgtatcagtgtggcggacgctcagaaatacgggcgtattgataaggtcgtgaacggcaagaaaactgttatccgagcagctaaccaagtagccatcgccaacatcctgtacggcggtgagtggggacgcaagaatttgggtaataccgagttgaacgacggatggaatttcaggggcggcggtgacaagcaattgactggccgcgctaattggaccaactacagcatggacacctatggtgacttgcgtgtgctggagaatcctactctgatcgaactctatcccgacaagagctacactgctggttggttctggcaacgcaacaagctgggtgacattgcttcgcaatatgtgctccctgatgatcccaaatctccggagtacgattccatcctgcgttctactgttacggtagttaccaagaaggtcaacggcggtgacaagggtttggaggatcgcatcatgtggacgaaaaaggccctgcaaggcttcaatcaactcgtactgtgactaacgtgctgggaacattagttcccagcattcttcgtataggcccctgactatgagaattttagccaatagcaccaaggtacgcgaaggggatttctccaagcttcgtatcccaaaagcaaagcaagtcaaggtgcacacgcatgacgcatggcagggccgaaagaatcatcacctgtcctacgattttactgcacctagcactagcatgcaccatcaagcagtcgggaaggccatccatgagcatcttgcgtctcatggcctgtctccacacaaacgctccagttcgggcaacacggttaccattgagtacaggcacccatcgggtcaccgcgccgttgtcaagatgaagcgtacaaagctcgcaggcgatcccaaccatcacgtggaattcgccgtagagaagaccggtaactaacacttcaatgaggtaacgtcatgcccttgtggttgactgcatggtttgcgaaaatgtgggccaagtgctcgcagtatgtcattgccgctggctccatattggcggcaattgctggtatcttcctgtacggtcgcttcaagggtaagtccgccgccgatgcaaagcatgcggagcaggatgcgaaacgaattgaggctgaaaccaagatcgttgagaagatcgaccaagctcacgaatctacccgtgagcaggtcgaggaaaaaatcgagaaaatccctgctccaactacggatcctaacgagacagttagggtgggggatgcacctaaagattcggccgcaggcaaattgaggggctggtaatgaaaactctcctgattatcgccatcgccttacttgcaggctgcgcaactactccacaagtggtggctcaaaccgacatttgcgctggctggaaggccatcaaggtcaacgaaaacgacgaattcacggatggaactgccaagcagattctagcgcacaattgtcaaggcgcagccttgaagtgctgggcctatccgaggaatgatccccaaatttgtgaacgctaagaggtaacaatgccgctgcccacttccatccaacccatcattgagaatactccggacattctcaaagcatgtgttgaagtctatcagtccatgtctctgctacaggaccggggcttcatgttcttgaacgagcagattgaattgctcacgtctacgggtcaggtggcacacgtcaccactgcgtatggtactcaggttgagttgcccacgtatcatactctggcagccacctcgaacgcctctacggaattggtgcagcagtttcagcgccaaatctacgacgtgttcactagcaacaacccgacggtaatcattagtgacggtcttggtaacgacactcaggtgatcggctatcagaccatgaacgacaaggttaacgctacgtcggacgtggcttctatcgccaacaccaacgcgctcaacgcgctgggtaaggccaccgaagcgctgaaccgtgttaccaactccgagctcaacgccaacgtggctttggcgaacggcacaccacccacctatcagacgcgttcggttctcgatactgttacgacgatgcaacgcaatagtatcgcctacgtgatcgctgatccggttcccaccaacaacaccatctaccagtacaacggtactgcatggactcctcagtatgatcggctgctgaccgccctaggtagtccgcgtggctatctggccccactcacgggcgctatctaccgtacctatcagagcaagctagaatcactggttactcctgaagacgtgggggccaagggtgacggcactactgatgacggtcccgccttcatcgccgccgctgcgaacgggcgcctgattgtgctgtcccccaacaagacctaccgtatcacctccaacgccactgtaggcagcatcatgcctaatggctccaagatttccatcggtccgggcgctaccctgacttttgatggcctgatcgtggacgatgctacggttgtgtttacgggtgagggcaacgccgtcagcagcactagcgtctacagcgttggctggttcgcaggtgatagctttaacgccaagtggctcgccatgaagcgtggtttcacccagcaggtagtcaagtacgtcacgctgccgatgccgcaccgcaccgatcctgcggcaactaccgcagcttcggacggtcaggcacgttggaagcttacggactctgtggtcttcaacaatacggaatctaacctgatcgtcaatgcgctgggcgaattccttgtggaccagtccgcctcgctgtcggcaggtgctttcatccttggcgagctgactgccccctccagcatcaacttcccgaacggcttgcgcgtcctgtgtaacggtagtgcaacttatggtctgcgcgttcgcggcggtagcagcatcagttttgaagaactactggttctggacagtgcaaccaactccggcatcctgtgggacaactataacggcccgagtcatcgcattagcttcgaccgcgtgcgtatcgacggctttggtgtggcaggcgtaactatccagccgcagggtggcccgagctatccgaaccaatcgcctccgatcacttcgtgttcgatcaattcgctgcaaacgcgaggcggtcgtagcggctgcacgaacttcgtcaagatcgcgggtaacgtggatggcctgaccatcaccaacgtccttgaagatcgtccgtcgggtagcctgctgttcgactggagcgattccatgttctcgctgactaacactcagtacggcacgattggtcgctccggtttggagattggtcacattcaggcgaccagcacccagctgcccatcatccgtgcgttcgacagcacttccgctgctgaccctgcgaatggcaagatcacgttctcggtagagcacatctatcaggcgtatcagcagaacatcgttccggtcatcatggaatactcgaagaactgcaccatcggacgtatcaacgcaggacgccccacctctagtcaggaagtgcttgtccgtatcttccgcgactgcgagggtatttctctgaccggtacacactacaccgctgttcgtagtcaggccctgcgtactcagtttgacggacgcttcggcatggtggacgtggtgcagcagaactctgcgatcttcacggatctaaacactgcggcactgacgttcaagtttgacctaatctgcctcacctccgcgtctacttacgcttcgggttgggcaggcgccaacgctctcgatattcccacgtcgctgaccaagaatatcaacgttgcccagggtccgctggaaggaacgaccggccctgaaagcaccatcagcatcagtgctgcggaaaacaagttctttgtggaaaaccgaaccggacagaatcagctcgttgcggttctcatgtcctaacgtggtggtcacatggacgtgaccctttcttgaggtgcacaatgaagctattggtattgatcggagtgctagctctggcaggctgcaactcgatgcctacgccgtccaagccgctgaacactggggacgaaacgcaacctcctccgggttgtgtggaactacgtaagcaaggaggcaagtgctaatggccctgtcggtacaagattacacggcactgcgacgcatccactccaaggcaatgtctgccttcaagtatgtgtcggacaaaaccaaatggggactggtagagtattgggaacccgaggacgtactgttccccgtaggtgctaggtttacgggagattgcgaagaattcgctagagtgtgcatgcaggaaagcatcaaggccggttacaaagcacggctcgttgcatgccttactgaaggtggcgaaggccactgcatctgtgaggtggcggatgaggaagaaacgggatcgttcttcttagacaaccgcaagaccaacatcgttaccaaactgggattgactggctacaagttctacagcgtgtcgccttggaatccccaatttagcgagactcggccgtggaggctggtcaaggagtaaggtatgtcgctggttccaaccaacacaccacggcaaaagatcgctgccaaatacaatcctagaatcactaggattcggaagcagaaagcgcaactgcgcaagtccttgaagaacgccaatacggcacagcgcaaggtcatcggtaacaagattctggccatgagtaatcagatcgctttgcttacggtacagcgcaaccgcgagttgcagcgcctccgataagccaaaagaaaagggccacccctttcggagcggcccttatgttgttgggttggactgcaaggatgctagtgtccaggagttaaggggagcacgatgctccccttctttttatcagccctcgtactcgtcagcgtcaaccggagacgactgcttacgcagcatctggcgttcagcccagcgggccagcttatcgaagttcttgatcttgctggcttcctcgaagacataacggtagtcggccgcagacagacgttcatcgccacagttcttgatggacgcgtgcactgcatccatgttcatatccttggcctgaaccatgatgttcaagatgaccggattgatctgattggcgatcaccacgtcgttctctgcatccgggttgcgaatcggcttgcggttacgatcacccagcgctgccggggtcttgccactgccaccgttctcaatgcccatcgacgcattgatgacctcgttacggatgttctgaatacgtgcatgctccgcacgtgcatcgctgcgctccatgaacttgttggccgcttccgggtcgatgatgagcagcagaccgctgttgaccgcacgcttgaacggagccgaattgacgatcacgtcacggtcgccgatttcaacaaggttctgaggaatgaaggaagcttcaatcatcagtcggttgttgtcgtcgatgtgcagggacacgcgcgagctatccgagtgtgcattcaccgccatgcggtttacgttcagcacccacagttcgtcgtgctccgaacgaatggcgtccatgatggtgatggcgtggttttcaagactcatgagaaatctccgatgggtttaaggatttgatactccgcctttgtcaggttcaataccctgcgcaggcggtgattgtgggcattgaggaaagccaagtcgccttcctctaactttttgattcccgacaggaatgccttccagttctttctagacaaggcagctatgaacttgctgacggaccatttcgattggctaaaccaaggcgaagctagtttgtctctgcacagctgctcaatgtcatccggtagcactgtcgtggcatacggcacgcgctctaggaatgttgcatactcatcgagaatcaggatgcgggctattcttaacttacctctctcccgagaggtacgcagggcagctaacgtgatgcccttggtggttgcaatgagcttcggggtagtaacacctttgatgcacattccctgagcccaatacatgcaggagaagttcccacatgatcctgtataagaagtaccgataagtggacagcgaagctttgtcactttctccctttccgactaatagctttgagtagcttgttcaaagttgccttggtgaattggtagtggggcaggctgtaatatagctcggacgcatacacaccaataagcatcgcatcaataacgtgaggctcttgatccgtttgcttgtatacgtcctcaaggttgaacttggcgttgaatgcgtttttccactgcgacgcagggaataccacagtcggttctttcgttcgtaccatgaatgccccgatcattgcgttcactgcttccatcgtggtgccgttcaagcccatgcgatacatgaacctttccgccgcccacgcagaagcaccgaactcctgacctagtgactcaatctcattcaagaagctcaatacttgcattcgatgttcgcttccgaccatcgacttaactgtgctgttgatcttccctgatccacgtactactggaagttttccatactccacgttgaggcatgcccatgcacagttggacgtacctgggtcgagactgagaatggtcatcattggccgctcaacacggcgaatgattcccgcaacccaatcgaaccctgatctgaaccacccttcgggaagctcataggcattgcgtcccttgaccacaaagacgcgcagctttttcttctttccagctttagccaaactgacgaacttgtcccattccgagtacagcttgtttacgctcactgcacagatgggggcgccgttggccatagcagacggaacatagtggcggacgatcttgtcagtggtaaaggcgatggaatccccatccctagccgccgtgatcttgccacgtatacaattagtcggaaggcgtcctgagcgatatttggcaggtggggccttgcatttggggcagctgtcgaacttggtagccgtagcccaattatgtgccgccacgaactgcttgttgcacaccttgcacaggtaacgccgtcctttagcctcaatccgaatgggtagcacacggtcgaatttcttgatgacccgagctatccattcggcttgctgctggcctcctgcatacatgcaagcctgacacttgcctgcactcgacaacataacccgagggctacgattgaacgtcttgccacaccccacgcacttgtgggctatggctatgtccctgcctcgatacttacccagcatcaagttggaaccaaatcgcttagtcagcgccgcagtgtaggccgctgccttagccccttttgccacaaatcctccgaaattggcggttaaacgtgctatagctgggattgtctagatagccccagcagttaattttagatgacaggcaagctccccttgaacgtagcgggacgcttcctacgcctattatttacagtattgccctgaaccgatttcctcataagagttgctcatggccactagagtttcacggccgaaaaggccatatctacctcccaagaataatcggttggtgagtgtagggcagcgtaatctacaagccctgcatcacaacaatcgacagaacgtaatcaacgccatcagcgctaccgggtaccccatcaccctctacaacactctgaggacgggcatcaaatgtagctgcatgttcgtacagcaacctccgaaccaactcctagatcaagaggggaagctttcggaaagcaatatgaacgcgcttcttgagcctagctctggcctacttgattacggacaagacacgctaccctctgagaacctgcaatcggttcttccggtggagcgaatcgcgctcaacgatacttcgcgtccgatcctgaatccatacgagcgcgccgaacgcactcaatttgaccacatcgacacatccactgcacagatggatcggatggtggacgattgggatacgctcgaaatggatacggagtttgacgcagtgctgacccctgaacgcttcatggctaatcagggacgcgcctgcgccgtgtgcttcggtacgggttacgtgggtgggtacgaactgctgcatggcactcgactcatcctgacgcctctgcatccacatgagcgctcggacacgattgtacttgatcgcaacgccagtcctaacacgtttgacagcatgacggaaggttgggttcgtttccaagtcacgctgccgcgaggcactgactacgccctattcccccgactgttcaacaacacgatccccatcccctacaaggaatggaagctgttggataacgagggcattcggatggaccctgcacgtatcaaggaattgtgcattggtaaaccgatcttcattgaggtacacgtaggtaagctagtgttcacccatctggagattcttctcagcggtcggcctcagaatcagccgctcaaagcagacagtcctgaaatccagacgatcactgacgtgaaccgaatggacgccaagacgcctgttacgtggattctcggtggcacctacaatatctccaagcgcgctgtggtgattgaccacttgccgggaatgagtaggcactggcgagtcaacgacattcaagcccgtcgggataacctcaactggatttacgaagagactctatcgagtcgattggttgatctgtacgaaatcacccaactcctacgtcctgtccgttatgaaacggccccactagactaaaacaacttatgaacaagctaaagcgtctcggtcagtctacggtgactgctctcactgattatcagttccgcactgtgggtgaagtggaaaaggttctggcaagcatgccgctgcctacgatggaaactgccacgtccctgcgtcgtctccccatctccgactcgaaggaagaagtccccgttgaggacaacaagccagaaggttggacgccgggccagcgcctgtccaccaacaagttcaagcatactggtgttccgggtgagccggtcaagttcaatcagcgtgaatcgcgcgagattcgggccctgaccaacctgcaccacgacttggcggatcagggcgagaagatcaactctctcaaggtcaacgccctaaattcgttcaagggttccaagtttgaatctcagatggaacgcgctcttggcctgttcgacaagcgcgagcgcgaactgctggaacacgaactggacgcacacggtcgcctgcacgaaatcgcagagaatgcgatccccgaggacgcccgtgtcacgttcaacaagacggtcaaccccatcgtcaagaatctggcaggcaagtacaagtcgctgacccgtcgctacaccgtgactctgctgccgtcggatcagaatgtggtgcagttccagctgatcgtctcgctggagaagctcaagaatgacaagggctttgtttacccgcacttctacatgattgtcacctgtatcatcgacaatcggaatcattaccactactacgtggacacttcgacggccaagccggttcccaatgtgactcctatcgagcacgaaagccgtggcttctccttcaccaaggctgatgacggtcgccgcctgctgcaatcgcacctgctggtggacgaaagcatcgacctgagtatcccgactgaactgccgcgcagtaaggaagagattgagggcaccaagttccgtaacgacaacatccgcacggtcaaggtcaacgctgacgatcacacgatcacgtttaccacggataaggatgttggtcctaagctggtggacaaggtggtaaaggacattctcgccgatcttgctggtctgttcctgagcaagaacctgcatgagaagatgaagcacaaggtaaccaagctgagcaccggcggttacaaggtggtggtgtgggttggtactccgactgctcgcatcggtaaggagtatcaggcagacagccatcgtctcgacgtgttgcagcacgatctgggtctggatgaaactcaggtcaatcagattcgccgcatgctgcgtggccgctcgcagattcgtattccggatcatgagtaagcttcggcaggtgctggtagtgcaggcggacaagggcaacaacgtagatgaccccaacattactcaggacagcacggcgctggacaatcacgaactggcaatcttcggattcggcaagaaggcagcgcatgaacgcaagcgcactgctttctacaagcaccaagactccgaagtcgagcacctgaaaaatcacgcacgctctaccggcttcaacggacacatcatgcgcggtggcaagttcaccaaacgatacatcgcgcacatcaagaaagtgaatgaccctgccatcgcccaccgggtcattcaattccatcacaagaaccagcttggtgtgaagcatcgccttggctatcatcatggctttactaccgcagtagtagacgccggacctgatccgcacacggatgacttccacgatctaaacgcggagcattccatgactgagaagactgaaaacgctgcactgtggaacggtgaagcaacgcacacgatgggtgacaaccttggcgagattatggacggtcgccagtttgttggtaccttgcttgactacgagttcaacgaagtgcccgtgtggtatcagccgcgcaacaacacgcacttccgaggttcctccacactggtgatccctgatcgcacggtggcctacggtaactggaaggttctgtctaccaacggcaaattccacgtgcgcaagctgcgtgctttcctcgacaagcagctgccgcccgaccgtcgtacgcctgactacaaggcactcaagatcgaaatcaatccgtcggagctggtcaagtccgtggacaccacgatccagcccaagactcaggtggacctgacgggtggcacgatgaaggtcactcaggatcgccgcctgtgggacgatgaaacttcggtactggcgaacgaacagatcgacatgctgctcactcagatgacggcggccggcttcaattttgtacgtagctactacagcgtacactacgcgttctacaacgccaagctggataaccacgttctgttcaacctcaccacctctcggaccaagagcattcaggaaatcgagaatgcactgaacgcaatcagctggaacttccagccgttgccgttccagtggcctgcgtacaactacaccgctcccacgtggcgcgctatggtggagttggataacgggcgtcggcttgtgatggcattggactacgccaagagcactttggtgttcgacctcctgtaacggaacttatatggacagggaaaaagagcacccattcgactatcatcttcggatgacgaatcttgctgccaagaaggcgcacgaagctacggcccaagggcagcacaacgaagcgcacaagtggcatctgaaagtcctgcatcacataggcgaagcgcgcaagcacaagccacccaccattccaccttccattgcctccgagctcgctaaaatggcacataattccaagatgcacaccgcatctgcgaagacttcaaccctacagcatgctcatcgcatcgttaatgaccatgcttcggatatccacggtggtgattcgcacagcgacgtttctaagcgtcgcttcactcgttatcagctccgcgctggtgaccttgagaacgctatgcacgaactcaagaccgctggtttcaagactgctaccaaccatgccccgagagccaagcatcacttggtaaacggacggacgcatgttctcatcagtcatcctgaaggcaggcacgaaactcacatcgtcaacgttcagcacgcaagtgttgattcttctgagaactccaacatggcactatctgcgcaggcactcgccaacctcaagtctatgaatgaaactgcccgtgaggatcatgaagatcatgagccctacggcatggagaacaagccccgtcctaagaagactactgcaaccacggaatctcctgccgaactcgcggcgtatggcacctatcggggttatcacccgcatcgcgccctacatgacgaagcgcgccatctgttggaatcccgaggccaccacgctagtcatagctctgaccgcctaggtgctctctccggggttaggggcatgcgtgttcaacatcaagttggcagtaccgcaactaaactgccccgccccgaacagcacgccgagcacatggctgccacgcaagaactccacaagcttgttcagaagcatggcttccagcatacctctggcggtacatatcatcatcctgagacgggcgcaaaggttcatatccatacccctcatgtaggcaagacgggtgatagttatctggatcacttcgataatcataccaatatgagcatcacccacagcctgagtaagcgaaaggctacggcgggtatggaagaagaagtcgccctgttcagcaagggtccgaagttcggcaagaactggaaggatcatgagagcgtggacgatcacaaccatcacatgcgccatgcaggtaagcatcttgcggagtacaacaagtacgctgccaaggtgaacgaagcacgcgccgctggtcggggcgacgaggctaacaagttggcagagcgtgctcagcgccacctcgggtggaatcgcaaccacctcgcacgcgctcgcaaaatctaccacaagtcgatggccgcatttgaggcggaaattgcttccctgactgttgaagcagccactggttctcaaaaggcagcagacgcacgcgctgacgcacgtaggatggaaaagttccacgggtatcaccgccgcgccaacgacgctcactccaagcttggtcttccgggtgatcacgcccacgctcaccgtagtgcttccaaggactacggtactgccttgctgaatcatgttggtgtgcacgcccccggcaccattgatagtagtccgggagaacacaaggtaggtacccatcgtcacatcaagggctcctctgcttcgcacatcagcctgcactctgtccataacaagttgacggacctaggctacgagcacaagggcaaggtaaatcatgatgacaaggaactggaacatcatgagtaccaccacccggagcacaagttcacggtgtccctgtataagcgttctacgcacgacggcggcaaggcgcatcacagtgttggcgctatcgtacaccatgcacctaatggatacgaacaccatgccaagggcctgactgctactaagcccaccacgtaatgatcggtgaacgtctcgcgtacccaactggatatggtttccagttgggtattcgcacaagtgaacgtaccatgtggtcagatgacgggcgcactgttcctctggatcataagccgcaggtagttgccaatcctatcaactgcccgcatccaatccccgaggatcaattgatccctgctgattggcgcaatctgctcacggccaagcttcggtgtcctgcttttggtacgcaacttctgtacggcatgtgggcgaccatcgctcacctgagcaacttcaaagctgcacagacgccgttgatcgaaatcacggatgatctacctgcgcataaccttggcaacttcaacattgtccacggtcggcctcgcatacaggtagccaagtcgcgcatctacacttacgcggcgctggcgtcgattatcgctcacgaaactgcgcaccaaattcaacgcaccgtgttcaactcttcggaagagtcccacggcgaactgttcgacaagatttgtagggagattacctcccggactggcattgcgatccatcgtagtgtcgattttgttggggacaggtcattcgctgttagcgatcccctgcctagcaagtaccccatttactacatcatcgctgatgggcgggtatcgtacacggatagtcatagtgaagtgacggaaataatcactgctcctgacgctattgatgcagacctccaagtctacaagagccacgacattagcttgattgactggctccgtcctgaaactgacctgaaacgatttacccgagttcgcccggacgtgctaaaggtcatcgcacacagaggcacacgcatttacccatgagcaacattcacgatttcatcaagacccagctgctggctgctgcccatttccaagaaacgctggatgcgggtggcaagaagtggctcaagagtggtggtatcgccgacggtcggaagttcctagaggaacgcaagttccctaaatcggtcatcaaggcatacgatactgccatgaagaacgtccttgcaggtaaggactttgaggaagacgttgatccgcatttgcaggaagtacagaatgcagtgaaggagcgtctgcccaagctgaccaaggacacttctattccgatcgcagacatcaagactctgaaagacgtgagtctgatcctgcgcactgaatcggactctgcatgggcacgtgtcgagaaggacattggccgactgcgtgacgaagacctcaaccgcatcatcgctcctgctgtggaatcctccagcaagtacgtcaaagacctcaaggcagcgttcaagaaactgacgggcaaagatggtactgacttccgtgacctagaagaactggctgatcttgatactgatgagtatcgggaagcagtcaagaagatcatgggcaagaagccggctgctgctaaggaattcaccaaggcacgcagcgagtacaccaaggccagcaagaaggcccacatggctcatgtacgtgcttccggcagtcacctgatggacgtggagacggccaagaaacaccttgagtctaagggcttccgtcactccatccctgaaggcttcaagggcaagcttgatgaaaacggacgtatccacactgagcatggtgaacccatcgccggtggtatctccggcaccgtcaagatgaatccgaagtacgagaagggttctagcgtcaatgtcctgacctactatcctccgggtgcgaagacgccgcagtacctgttcaccgcaggtgccaaggctaacgccatccagaagaagagtcagaaggttgacgaactgtccgacaagattggtgacctgcgtaagaagtggggcgctgacctgaacagtaaggatccgagcactcgcattgctgctgccattctcgaagcctgctaccacacgtctgcacgtatcggtaatctgagcaacaagaatgatggcatgacgaccttgaagggtaggaatgtcaaggtcaacggggatacggtcaccttcagctacactggcaaatcggaccagcagcagaagcacgtcatgaagggcgacgatcccatttccaagaaggctgtggaaatcatcaaggccctcaaggaaaacgcgaagcctgacgacctgcttttccgcaacaagaatcgccgcgtcggtagccgtcaggtcaacgattacttcacctccctcggttcccccaccacggtgcacaagatgcgccacgttcgcggcaacgcgatcatgaaggaagaactgaagaagaagccgaagactgacgacgacaagaagatcacggccttcctgactgcggctctggccaaggttggtgagcagctgggtcacttcaacaagggcgaggtcaccttcgccactgccctgcaatcctacgtctctccgtcaatcgttgagaagtattatgacagctacaacattcgtccgcccgcacgcattcagaaggttattgaccaagccaagaaggacaatggtgaaccgactactaagttgcaggacttgccgcatcacggcgacgtggcggaaaagcctaaggtacctcgggcggttaagcgtgtagcaaaggaagaaaaggaagcaccgaagccgcgtgtagtgaaaaaggtggagaagcctgcaccgaagccgctgcgtcaagtcaagaaggtggagaagcctgaacccaaggaacgcaagcccacacgcacggtcaagcacattgagctgggtcccctgtctgcacagcctgtgaagacgccagcttggttccagaagttgagcggtaacgcacagcggacttacatcaaggaaaatccgcacaccaagttgaagcccaccaagctgccgggctcgaagtaagtaataccccaccgactaaccctcggtgggttctgtctttgctttgtaggagaatcaacaatgcctgttcgtatgctgcaaggtatcgccaagaaagcgggtaccacgcacgaccacgcagagaagatttgggacgatagcaagaaaatcgttgataagaagttctcggaagatgacccgagctactacccatacctgacagggatcgtcaaacgtcgcctaggcttgtcgaaaggtgagaaggcgatgttcgactcccaagactctactaacgaggaagctgacgtggaagaaaccgcaaagaagaattggagtcaggaagtaacggacaacgaaaagttccatccaaaggaaggtatcttcaagcagagctcggagaagatcgccaagtatctgcttagtaagggtaaaggaaaggccatgagccgcctcaccttctacatcaaccgggctggcaagtcgctgagtcccgaagatcgtaatcgtcttgagcgtgccaagaagattatctccaatgctactggcaaggaaacggccaaggcgcacgactataccccgcagtacaagacgcctgaacaaatcgacaagggcctgcgtattacggacaagttcttccgcaccatctacttccccaagctggatagcgacggcaagatcgttggctacgatgaagaacaagtcagttcggtggacttcgtgttcctgcaatctgatcccgacactgatcctgtgtggactgatccccacaccagtgcggttgtcaaggcgagcaccctgcatcactacatggttcaccacgcaacccctaacgcacagcgccgtcgtcggaacctgctgcaagcttacgcatcggcaaccaacttcaatggcccgatcatgagcaacggttctgtcaccgctgagttcatgtgtcacatgcacggccatagcagcattgctatggccgaagtaagccgctcctttgagtaccacaaccgagttcatgctggcgtggatgacgatctgattgcctccagctgatacggatgaatcctcatagtagggagtggccaacctaactttttaatgaggagaccgatgttcgacctgtccatgatcgaaacgctgaacaacttccttgagacgccgaccgctgcgcgcgcaatcgccttcggtatgcttatctcttggggtggtacgcaactcgtcaagttcaatccgctggttcggaagctgctgaatcatctgccgcccgaaatgggccggacggttgtgcaagcaatcgctttcctgctggcattcattcctacgttcctgctgtggccgggtatgggtacggtcaaggtactgggtagcattgttgtaggcacgtggtcccccaaggcgtatcaaaaggcgacggtggttctctaccacttcttcccttaccttgagcccaagctgagtgccacccctgttccgaaggagaagtaatcctacttggaaggtaggagtagcaacaacatggatgttccacctactactaatggagattcgccatgtatagcatcaccaatctcggctttgaacgtctcgttgttggcagcctgggtttcgagccgcaggttgcccacccgatcagtgatctggacttcgcccgcctgtcggtagaggaaaagtccctgattaacgccaaggttgccgagggcaccttctccgtggtgcacaccgctgaaaagcagctggtcttctctccggctcccctctcggctggcctcggtcccatcgttgctgcggaaaatccgcagggctgatccacacttagaggttctccagtatgtatgtgtttaccaacacctcagctaatcagatgacgttcggcgacctgacgctggccccgaacgccaccactgaattccctgacgatcgggtggctgccctgagcacccacaacctgaaagcgctcaacgattttgccaacggcaatccgctgatcctgaaggtcgagtatcaggcttcggttccgccggtcaccatcggtcctgtatccgccgctcctgccatttctactccgttcggtaacaaactgatgcaggctgctgatgcagatgctgctaaggaactgctcggggaaggtcaaggtagtggctatacgttgcctgtcgctacgggctcggtccttggtggcgtcaagatcggtgcgggccttagtgctaccgccgatggcaccctgagtcgcagcgcccttgttgccggagacattccagatttggacgccgccaagatcgcctccggcactctggcggttgcgcgtttgggtactggcactccaagtgctgctaacgtgcttttgggttcgggcgcttttggcgtacctccgactgctactaaggcaaccgctctggctacgggccgtaccttcactctgagtggcggggcttccggtaccaccgcctctccgttcgatggctctgctaacgccaccctcaacgttacgctggctactccgacaagtgctctccgtggcggtgtcctccagcaggccgccattgctgacttgaccgccgctcctacccagcaggatttcaacgccctgctggcagccctgcgtgcagcctcggtaatcgcttcctgacaacaaccgggccaaggacggcccactagtcgggtaaacctttcaaattagccgggtaagggtgcctcaaatacggtacttggcagctaattttactgtgaaggcgagggctattcctccgtgcttttcaggtgcagggattcaccacttcctatggcctcaactcaatgtcagcctttcctaatgtaatcaatgacgctgttgtcggacaacaagtcgtagccaacgcgagcttcttcattgctcctaacacggatacgaccggattgattgcccggtacagtatcgtagacgcagacgatgcggagtggacttccggcatcgccacaaacattgtggtgtcgcctctaggttcgcgctccaaggtgaatgcctcggcttcggtcgatattccctacacgctacctgtcgagttctacggtaccaagtatcaactggcgtggacccttgaaactcaagatggtacattcgtttccagttatatcgagtcgttcaacgtcaagcctgtcatgcagggtggcgtgttcggcgtaccggacatcgtagaagcagcaacagacaaaacgattctcaaagcggtactgccttccaacgatcaagtggaagtgctggtgttcaagggcaacgcctgccttaacaacggcagccctgtcatcctgcaaccgggtgacaaggtattcaacggtacgcagtatctgggtagtttcaaccatgctaccctgcgtaaccccggagcgtcccctcccccgaattctgcgttggggatcaaccagccgtcccctgctctcatacaagcgatggcagcagcgcgcggcttgaaccccgccgacattacagccagcaatgaatcgctgactccttcacttgagccctataacttgtggtggcaatacaaggatgaggattcgggtgaggtagttgtcgaggatagctatctgtatcatgtgactccaatgatcctacaggcaggacgggagctacaacagtttgtgaaccgcgctaacaacgaaggccggttgcaggaactgaccatcgacctgaacgtaatcattcacttcctgaagcaaggcggcgactacttcaacagtgtcggtatgccaaccttctttgacttcacctgtgctaatggacccttccgtcaattctgggtcatgtgcagtgcagtgcgtctcctccgtagtcagtaccttctggaggccgaacgtagtatggtgatgcagggccagagcgttacactggacattgacattactgcgtactacgaaactgcggcatcggatgcccaagcattcgttgaccaatacttgccggagttcaagcagaatatcacacgcaagggtctgctgaccggcgacggtgactacggcaacggcggcatcatttcgaggaacgtgggtgctatgggcattcagttgtccgcgaccaccaacctgttcttcggttggcgtaatcagtacgcacgccgtggcctgttctaagggaagggacgataatggataacacaacggccgactacgcgcgcgctgtgtttgagtacctcatccagcggtttccgaaggtgtggggtaaatgcaagtacagcacgaacttccttggtggaggggccactagatacagattgttttcctctactcccgacacctgcgtgacctatggcagcagttacttccaaggttatgcctaccatgaagtcatcctcgaccacacggtaaagggtgattgcgaatgcctgctttacacagcacggtctatttacgaagacacaggaaataacagcagcaccacctatccggtagacatcgctgctgtcaaggttgacatgagcaaacccagttcggaaacggcacaacagatcgctaccgaaatcttggagtctttgcatgccaatgccgcacagattgaggacgtgcccaatgaaagctttgttcacgcctgcgattggcacgcaaagcagttgtatagcgtgtcaccggagcagactggtggctaatttcaaacatgccaagacttcaactaatgtccgaagatgctaacactcggactgctgtcgagttggcgcaggtacgccgcgaccttgatacccttctcaagatcgttcgggatggcaacggtacggcggccctcatcaaccgaatgcagtctgtagaaaaagaccttactcaccttgtagcccgtgacaaggaagcaaaagaagagcttgaaaagctcaaggtgcagtacgcggagttgtcaaagactctaattgacgtaaaccattctgtcggcaccatcagcgcagattttgctcgctttgttcaggagttcaagatcagcgaggatgcacgcgacaaggcgcgcatcaagaagaccgatctgctgtggggcatgattaccacggttgtcgtttccctcgttgttaactacgtgctcaaccacaaggttgttccttcccagccctctgttcccaccaccgctgaatcgcggtccaagtaattcactggagataaacatgaacgcaagcttcaatgaccgcatcggtgctcgtctggcccagcgcactaacggcatcaagccgcacgctgacattctgagctacgaactggttagcccgaccgtggctaaggttgtcgtcgcccactctcaccgtggcaccactgctgagaatcgcgccgctctggcttcgctgctggaaggccgtggcaacgtcataccgcacagcttccgcgaaatcgaaacggacaacgcccaccagcgccgtatgctgtcggtcggtttcgttggcgccaacgtcctgtctgaggaactgagcgaagaacgcgccagtcagctgaaggagattgccaagaacgtgctgatggacgacaccgacaacagcatgtggcaggttacgcaggcttcggacggccgcaagttcatccgccgtcagcacaacgaagaccttgcggagctgatgaccgctaccgcttcggtgaacccggccgccatcgtgccgaagcacttcaccgaaatcgctggcaccatcgtcgatacctcgggcccgttcacctatgctgcttacgtggacgctgacacccatcaggtgcgtttcggttacgtggtggaacacgctaccgtctacaacggctacaagcacaccattctgccgcgtgacgcttcggaagtcgagtacgtgtctgcctccctgatcgtggaagccgcctacaacgtcgatccgaacaaccgtctgaccaccgctcgcaaccgcttgatggaaaccgccggtattccggacattgatgcggtcaagagctacttccgtaaggaattcggctacggccctgagttcctgcgcgaactggaagccgagattgacgagcacgctgtcgcctaacgagcctagccgcccctgaaagatggggcggctttgtgccatccacaacattgatcccaagaaacactgaggactgcacatgccttccattaccaccaaccgttccaaggcaaccctgctcggtacctacttccgcaaggaaacggtcatggagccgaacggtttttcgattgccctcatcacttcggctggtgtcagcaccaacccgggtgagcaggttgcccccactccgtcgaactgcctgacttggtccgactgctcgcagaacgaaatcccggccggtaacggctacgtggcaggcggcatcgccattcagcgtggcaccgccgactggacctcgctgactgaggacccgaccaacaaccgtgcgttcgttaccctcaagaacgtttcgtggactgctaccggcggtaacctgcccgccagcggcccgggtgcagcctatgccgtgctgatggacgacactgcgaatcgcaacgtgctgatcgtgctggacctcggcggtgcacgtactgtttcggacacccagcagctgatcctccagaacgtccagtacatcgcaacctaataggagtaacgcatgaccgagattacgactacgtttgatgctgacgccgaacttccggtgtgggcatccatcgtgaacgactccgacggtcttaccaaggttcgtgtggatagcgagaaggcattccctgctactctccgcgagcttgacggtgcagtgcgtgaccagtattgggttgccatcgctcggtacgttatcggggaagacctccgtcacctccttggtccgggtctgaacatcgtcttctctgccgcgccccagtatgccaatgcggcaatgccgcgtggtaagggtgaggaacaaggccagcaggacgccccgttcgcttacatccgccttcagcagaagcgtgaaggaaccaactaagagtaccccataatgagcgtcctgttttctaacaacgcattgacggtgttggcagcagcggtcggtcagaacgaggttacctcgactatcactgtagcaactggtgcggggcagcgtttcgctgcccccaccaacggtgactatcaggtcattacgctctccgatcccctgtatacccgatttgaaatctgccatctaactgcgcgcacgggcgataccctcactgtgttgcgagggcaggaaggtactaccaagcaagcgtgggacgttggcgaccgcatttatgcgtccttcactgcgtccacggtcggtctcttcctgcgcgctgacactcctgcgtcaattagcgggctgtgggacttcagtacgccgccgctaatcaatggtaacaacatttggcattccggcaacgtcacgcctgctgatcgtaccaaggcgcagactatctccgggctctggacgttcacgacgctgcccaagttcaacgcatttaatttcgtgacgactcagggcgcaactatggttgggccctttttgctttatgggtccccgactcaggacaatgaggctgccaccaagctgtatgtggacaacctcgccgccggtctgcacgataaggaagcagtggtcgcagccagtactgatgccggtggtaatgtcaatatcaccagcgctccgagtacgctggacggtgtgactcttgtagcaggaaatcgcattctgctcaagaatcagacgaacaagacccagaatttgatctacgtgttcaacgcagttggccagccccttaccgctgcctcggacagcgatgagacgggtgatctaaaggcaggtagtaccgtattcgtcacaggcggtaccgtcaacaagaactcgcgttggaccgtcatcaccactgacccgatcaccattggcaccactcccatcgagtggactcagacgtcgggtgctggtcagattcgttctggccccggcatcaagatcattggtgaccaaatcagcgcagacgttccttctgctggtggcctgacagtatcggttgcagatggcattggcctgtctgtgatgcaagacctagtggttaataccggggctgccaccgctggaaccacgggtgcctccctgcgctacaacagcatcacggtggataagtttggtcgggtagttaacgctaccaacctaccttatgctctgaccactggcgcagtgtttacgggagccctcactcgcacttcgactccttcttccggcaacgacattaccactgtagactttgtgcagaatgccatcgtctctatcagcaccatgcgtcagccggttgctgcggtggctacgtccaacgtttccctaagtggcctaggctttattgacgggtatcaggtcaaactcggcgagcgtgttctcgttgcaggacagactacgcagactgccaacggtgtttatgtcaccacggctaacgcgtgggtgcgtgcttcggactttaacagcacttcgtccctcgccgctggcgtcatgttcccggttcagaacggtaccacgttcaagaatcagatattcatgctgtccactcagggcaccatcagtatcggtactaccccgatcaccttccagcgtgtaacgggtacgggcctgattaacaaggcttcgggtggtggcattgatattgtcaatgactctatcggtctcgaaacgcagtcaggactgaccgcaggcacctacaacactgctcgcgtcactgtgaacagtaagggcattatcactggcatcgaggcaggctcctcgggcgtgacctcgtttaatggccgtagtggcgttgtgatgcccgctacgaacgattacaccttcgctatgttgggtggcaagcccaccaccctcgcaggctacggcattaccgacccggtcatgctccgcactggcggcacgatcactggtgttgtgtccattgactacggcaatccagctgcaacggacggtccgtacccactgctgttcatgcgtcttaccgaaggtgagcgcaataccaacaaggttggtatgaacatcatcaaggaggatcgcaattcttgggccatcgctgctgtagctggttcggatgtagtcaacatcactaacggcagcaagttgaatctgcggttccaaaccgcaatggttaacgacgctgagattctcactgacgccaactttgatgcgtggactgccgttgcgttctctacgggtaacaccactcgtaacgcggtcgcgcgtgggtgctacatggtagacactacctcccttgctggtacgctggtactgccctccaatcctgctccgggcacagctgttcgtgttctcgatgctggtggtacgttcggtaccaagaacctgactatctcgcgcaacaacgctaggatcgtaggcgcgctggaagacttggttttggacaagaataacggtggcgtcacgctggtttactacaacgctgcacgtggttgggtcccgttctttagttgattcacaggcaggtccaccacgggcctgcctttcctttggtggactatccaatgacgattcttcaaacgctgtacccaatcccggataacgtcccacgaactgatgcttcgttcaacaccttcactggggtcaaccgattcactagggtggtggcaggtaattcaaccccgaacgaagcatacgatctatgtgctgggactacaaagatcggaagcaccctaaccgttattggcgatactacgctcaacattgccaaagctgcgttactgacaattacgggtagtaacgccatgatcttccaaggctttggaagctctcagggccgtatcaccctgttcggttggctaggtgtcgattccggcgatactctggccatcatcgaccgcgtaggtatgtccaactatcgctgggcgctcagtgcaagtcagatgacgctcaacgataatgctgtgtggcatgcaggcaacttcaatcccgatctgtacctcaaggtcgctgacgcgtcttctacttacgtcaagcttgccaacagtaacaacaacatcacgggcacggtgtggggacttcgctcggtcactgcatcgggctccgacaccttgtccatacagattcagtcgggcggtgcctatcagtacggacgtggcgctgtattggaattgaatggcaagaacgcaactggcagcaacgctggcggcttccgtctgctcagtgacggtccctcggcgatcaattcgtactccggcactctatccctagctgcctcgggcggtggtcagattacgttcaacagctccggcctgtctctgcaaggggccacgagtgttgcaggtgcaaccacatttgcctctacggtagcagttactggcctcatcactgccactggccaactaaaggttgggcctgcttccggcgaagcgcgtatcaactttggtctggacacgggctacatctacagtagtgccacctcaattggctactattggcccggtagtagcgctgtcaacttgtggcgtcttattaaaccgggccaaagcgaaggtgtttaccctgccttgtctatgatcgtgtcgggagggggttatttcgacggtattgttcgggctacctctagtctcatcagcatccacccggacgccctgcgtatgcggcaatccgcccgcaccgttattcaccgctttgacggcaacgcttattactggcttcgtactgcggctgacgaccccgatggtgtctgggattccgcacgtcctatgacctataatgttggtggggaccagttgacgttcaaccctgccggtggcatcacagcacaaaccaagctgactttgagtaacgctgctcctctgggctttaccggcttcggtgcagcaggcgctatctacattcatggtactaatggcggtggcgatgacgtttgcaccatcctacgcaacaatgccaactctaactacacgctgacatggaacggtgctgttacgatcactggttctcagacagtagcaggcgaagcttactgcaataattggttccgcagcaatagctccggcactggctggtatcatcaggtacatggcggtggttggtacatgtcggataacgattacgtgcgttcgtacaatcagaaggcagtggctggctctgatttcgtgatttggtccgatcgccgctctaagaccgaagatcgtgatcttagcattgctgacgtgcttcccaagttcatgggacttgcccccaagtggtatgtcaagaatggcacgaaagcggagtacggcatgttcgcacaggacgtgcgcgcactgttccccgatatggtcagcctgaccaacaacgaaggatatgacgattaccacttcctctggatcaacatgcttcatgctccccacattcttgtgacccaggataacgtgcgccgcatcgaagaactggagggtatcgtggcctcgcagcagcatcagatcgcgcagctgcaatctaggcttgaggtgtaacatgacgattctccagactctgtatcccattcctgacaacgtggccactctggacgctccgggcgtccagacctttactggtatcctcaaagcaggacgtatcctagcaggcaactctgtaacggatgaaagcggttacggattcgtcgcatctaacatcaaagtcattggcacctccctcatgcaaggtgccaccactctgtccagtacaggcaacgtctttggtggattctcggtagcaggtaatgccatctttggtggcagcagcctgtatatccgaggggctggtaacacctacatgacttttcagaatgcttcatcgcagactgatacccagctgattactgatcgaggcgccaagggcttcatcattcgtaactgggtgacccttggtacgggttcctatactgatttttcgttgaacgcggcaacgggtgctctcaagtggggtgcgcaggacatttatcactccggcaccttcaactggacgacctttgcagtcacgggaagcgccgctaggttctctgcattgacattgcactccaacgcttcgggcggcgtgttgcgattcaatgatcctgctgatactacctcagcaggtatgcggtacttctttgtaagcaattctacgtccatcaatctcaacactgcaaacgatgatggaacatggcgaaagaacaggttcaatattccccgagatagtgcgttgcccgtgcagatcgacggaggtacagtgtggttttcaggcaacctcactccggcggacacgaccaaggctgccatcattgaaagcagtagcttcacttgggagttccgggctgctccagtaccccaagaagttaacagctggcagtggggccccttcgtactgcgaggttatgactccgcgggcaataacgtgcgttcgtttgcacgacgggcggaggcgggtacggatgcgtcttccatcgctacgggtctccgaagtcagctgggtggcgtcaaccgcgcatggattgagtggtatctcaattccttccgtatctgtggtgctgatggtacgatttcggcttcttttagcgactctgccatctggctacagaagccgcttactttcagttctactgcgctgttcaacggcgtggccaccttctcctccgtcataagttcacgcaccggcactcctaatactcaaatgattttccactcgatcgggtggaataatggtgtgcagcgttgggcgcaggtgatggaagcgacgggtgcttatgtgtggtactgctacaatgccactggcggtaatcctacttctgtgttgtcgatgactaaccccgccaacgggctcgggggcaataaccccggcatcggcgtggcaggttcgatctatgtaacccaaggcatcattgcgcctaactggggcttcactaccagcgctgccaacaaggcatcatttatcgccactggtagttacggtggtggtttcatgtgtcaagataacgcaggtgctggtatctactacggaggtatgtatgctgcaagcggctgggtcggtattggcctaaccgctgccaactcggttggccttaacaagattctacgacttacgcaagaacagtacatgacggtacagactgaaggtggcttcgccgcccgaggtggctccgctgtcatggttgtagaggagcgcagtagcaccaacgtgcagttccatatgtacgctacaggtggtgcgtggcgtgtttgggataacgttaccggtgccgacaacctcacttgctatcggactactggtgacttgtacatccgtagttggggttacgctgccaactttgccatcaactcagatcgtagaatcaagacgtggatttctgatctggaccccgaggaagaactggacaaggtggtgacgctggttccacgcctgtacctcaaggacaacaagctggaatctggcgtgtacgcgcaggacgtgcaggaacggtgggcccacatggttaccgtgagcgagtcaaatccctatggcattgacggactcctgactgtggcccacaccatgctacacgctccactggttgcgtccatccaagccttgcacgctcgcatcgaaaagctgcaagcccgactgcaagagcttgaaccccgataaggatacggccaaggacggcctcaattttagggtagccctatagagagtatgacatgctactcaacggtactccgtttaactttgttccattcaaccagcccgagttggcgccgttgggagttttcatcaacgatacccagccggtgcaaatgtcggtgtcaggcattggctacctgacaaccgctattatcccgattcaggataatcaggccatccgcacctcgaccacgttcaagctggtcatcccgtatcacttcaccactgaatctcctgttgttggtatcggtctgctgcaaggcactaccatcaactacggctggaagatgcccactgctgatccggtccttggcgtcggcctgttgcagtaccccagcaacatcatcggtcagcacttcgagagccaaggcgaaacgggcataggcatcacgcaagaagcgactgttcgcatcaacttccacgaggaagctggattcagcgattacgccgttggtaagctgcaaatctctacagtcaagctcggctaccgtggcgagtctgactacatgcagggctatggtatcacgcagactacatacacctctgttggtacgaacattatctcgtttacgggtgctggtcgcatcgtcaccagtatcgggcctgtgttcgccgtgttctatagcggtatccgaatctctcctgatccagcattcgttaagctgaccactatcgaggaccaaccccgtgttatccttggtacggtcacgccgcgtaaccttactccacgcatccacacgtccacctcgttcagtgcgagtccggtactgtctacggtgcggccgcgcctcaagccttcgcatatcatcacgaaggccgaggcctccgtcaaaatctacaagcgccctgagcctctaatcatcgctgcttccgctggtcagcatagcgtgattacgaaggcgggtaatgtggtggtgcatcaggctacgctcaagctttctccccagcaagcccctgccatcgccactgccccctcgggcggtacgttcttcactacagctatcgtcgagcctgcacctgcaacgatgcacctcaaggccctgcgtggtacggagttccaagaagtggttgtcgaaggcgctgcctccatgcagacctcggcttccgctgaaatcaagtgggctccttacattgtagaccagcaagtcaccgtccagactaacgcaaacttcggtctgtacgttggctccatcgtggttgatgtaggtgtgatcccccctgtctctatgaaggttgggttggaaaaggtggtgcagaccacgctgactatcgaagaccacgtaacgtccgctacgtcggcgtcgggcgatggcttgatgggaagcatggcgttctcttacgaagcgtctgcgcaggtatcggttgctaacgatcctgtgttcctgactacggcagttcttaagccggagcctgcttcgattactaccagtgcaggtggccccaagattcagatgccgcccttggttctcgacaatgagttccaaggaagcgttcaaactgactccgaaggcgatgtactgctcggtacaatcaatgcaagtttcgtctctgccaagatcaagacgacggccgaaggtcaatttaagagaggaacggcaagcccctataagggcggtcctgttgtagatacggatgatcgacacatactcaacgttgaaccattgaacaaacccggattgagaagtattaacatccagaactaggaccattgactcatgcgcggcatctacatttcgaccttcgctacacagaagacgcaggaccgtctttcctatcttctcgcgcaggcagcctccgctggcattcccgccctgcttccgaacgatattcacgtcaccctagcgcacgatagggataccttgcacacgccgccggagttgtccgcagagtccgatcctctgcgcatctacactgcacgtgtgttgatggtggagcaatgggaaaccggaaacggcaatcccattctcgtcgcttcactgttctgccctgaactgcacgaacgttgggaatactggcgatccctcgggttggagtgggacttccccaccttccgtccacacttcagtctcaccgacggaatcaagggtattccgcgaaaggatgttgccaaatggtgccgcatcttcaacgaagccctgcaagattttgagtttgaattcacccacgaatacgtgcaatacattcgtgctgacgccttcaaggacccgaccgatgacgacgaggaagaccttgacggcgatgagcatcctgtagagtcgagcacttcgcacaagacgaaaggcggtaagaagagcaccatcccgcttgagggagtgcctgttcaccggcccaagttgagtgaccatgaagctcgcagcatgaagaagtttggcttcaacgcacacggtatcatggatcgtgtccatgacctaaggaacgatgatgacgaaaccgaagaagagtaagctcaagaaaattcctcttctgctgggaaccggagaagcacaggtgagtgcttctgccttcgacctcggggcgcttaagcgccccgaggtggtaaagaagaaaaagaaaaaggaggttgccgaggaagagcctgtcaagaagaagcggaagaagaaatcgcaggccaattttgctcccgaagagagtgcgatggctgaggtgcgtgaacgcgccgagcagctgcctgccttgaagcaccacgaacccaacgatcttgaactgcaaaagctgcgcgatgctaaacggtctatgcgcaaccttgaaggcacgttcaagaagtattcacccgaagctgccatgctcattgaacgtgagcagatcggtagtagcgcacagctgattcagcgaggcatgctgatgatgctgctagacagtatcccgattgcagaagacgcgtaccactcgcggcctagccagagtaacgccattgccttgcaggccctaatcaatacgggtcgagacgtgctggctgaaatcgagcaaaccaacgacggtacggaactcctgtctgctctcatgaacgaagtgatgctccccaacttccatgagattgcacaccaccttgttatggccctgttccacctacgtgagcaggtacagaacgtggtgccggacaacatgcggcgcgtggttgacggaaagttcaacgacattgcacaagagatccgagtctacctcagtgagaaattcgttgacctgcgcgagcgtactatggaacgcttgaaggaaggttaagcatgcccatacggaaaacgggaacggtcaaggtcaaccgccgctctggaggaacccaccgaatcgttcggggcaagtacacgggcactaaggaagggtggcgctccctgtcggacaagatcaagaaaagagacggctggtgctgccgcaaatgtggcaggaacaaactggctgtgcgcgcccgaggtgacttcctagaggttgaccacatcatcccgatttccaagggcggcactgattctcccagcaatctatggacgctttgtagcacctgccacggaaagcgtcccggccataaacacctgcaaaaacgtaggcaaccaaatgcgaattctccaaaacctgcgccataccggatcggctcctactcaggatagccccgaaaccgcctccttgcgccgtctcaccaatactgtaaagaaaggggaagtgcagaaaaacccaatttcgcccaagcagctagaggttctctccgtagaggctccagttgctttcgacgttatcgagcctccggcatctgaccttaccccgctgcctactgtatatgggccgccggtcatcccggaaggtgacgtggttcctgtcttcaagaagcgcaatcttgcgaacgagaatcggagagagatacgcctgctgaaagagcagctgcgtgacctgtctgaaccctccgaggacgaacagcttgatcgtatcctcgactggctcagttccaagaatctggatgacggattcaactacgcgcagacgttctacaacaccacgttccttgagagtctggacaagagcttcgccatccgactcgctcagaacctatacgccatgttcgccagtcaggggcgcgtttacgctccgtgggcggacttcgtttcacatactccggtgctggcatgaaagagatagcggcaacgctgactaacaaccccattgaacgtccggaaggcattgacgaaacttacctgtatccgctgctgcatgatggcgaggcggtgcagtcggtccttggcctgctggtcgccggttggaagggctacttggcggaaagcgccaagaagacgggtaagtatgcagtcaaccttctagatcgtaaggaccccgatcgcagcctgttcatgcctgatgaagactatctggcagacttgggcgagaacatcggtagcatcgaaaactctgcgcgcgtgcaggtgcgtcgtgagggtaagggcttcacgctttccttcccgatccttgctatgcacaaggaagactacaagaacaacacgctctccccgacctccctgagcaaccttgccaagacctttcccgctacgggagacacgggttccgcgatggtgtctcatagctcgccggagagctatcagcatttctacgaactgctgaccaaggtgatcccgaaggcttcgcaggctcagttcttcaaccctgctgaacccatcgacattttcatcccggttgacgtgaccaaggaacacattggttacaccccgaagctggaggcgcagttcgttagcgctgaaactctacgggctgctgagaagtacatcaagggctatcgtctgatcggcccaccgattccttcccgtcatcagtaccttggcgaactgtcggttacgcacgacgacgaagagactcgctacaccccgacgtccatcaaggacgtggttaacaagggtgactacgcaacttgggttgcgatgaatcgtgaagtctttgtctacgccgatctgcacctgccggaagacttcgccaagtttgttggccagagccacaacccgtcgccgtccatgatctttgtgtggttcatggcgtggatgcgttattgggttggcgacagcgcgaatgctcacgttgaggccgtccggcccatgtcgtccattcgtgatgagaacctgcatcgtccgaacaagcccaaagtcaacaaagacggcttgatgatttctccggatgggtacatctactacatcccgaccgtggataacgtagacctatacgagcaggcattccacgaatttgtggaacgcgacggtggcgtgttcactcttgcggacatgcgtagcacggtcaagccgaccaagaagctgcctgccaacaagctgatctacaccgattgggagaacaacaagatcgcctactccaactcggatggtttggtcaacatcctgaatctggacggctatcagcctgtgacttctacgcaggcccgcaacttcctcgacctgccgatcatgaaggtgcagcagcgcactcgcgtcaagcatctggcttcggtacttacctacaccctgcgcaaccgtgtgcctgagcgtcagatcacggatatgtcggaggagactcgccgtgggttggtcgccctgaacgttagctcccaccaagtcggtggtgcctacgtgaatggcgaagtcggtccgttcatggccaccttggacaagtcggtaaaggtgcttggcgaaatgtatgcacaggcgcctaacagcgttcctgctttgttccgtgactacgctgacacctacgggcacgaactacaggacgtgaagttccacaatctgttcgactttgcgcctatcaagtggatcggtaacgctctgcaaggtgccttccaagcggtttccccgtcgcttgttctggccgaacatgccagcgagcacgatcaggaagccatcgtcaactttatcgagtcgcgctacccgctgtcgggcatggaagaactaggcaccctcatcgccctagtcaagtacggcacgaactacccgaagatcgtttcctacgatctggcacgtcgccgccagtaccttgagcctgtgattccgggctatgattggcagcccaagccacttccatacgtcgctgagaaccgagccctgatgccgcatcaggcccgcatcgacggcatcctgacgctgaacaagccggactggacgatccttgacgttgacgcgggtggtggtaagacgggcattggcctgcgttacatcatcaccctgctggaaggtaaggacgtgaagcgggcgtgtatcacctgccccagcttcttggtgaagaactacatcgaagaaaacgtgtacttctacgatggccggatcaacatgatcgtcatcagcacggacaccctcaacacctacggtgaggatggcctgcgcacgatgattgagaactcgcctccgaacaccatcctgctgactgactttgggttcctgtccaaccatcaccgcaaccgcgtcgtgttctacggcagcggcgaagtgaccatcaacctcaatgcggaattcctgaccacgctgggcatcgactacatgatcgtagacgaatcgcacggcctgcgcaacgaggaaagcaacaagagtcaagcagcccgtaagctcgccctgacgatggacaagaaggccatcgctacgggtacgttcatcaacaaccaaatcagtgacaccgctggtcagttcgcactgtttgacccctcggtcttcggcaacaagcaggacttcattgacgaattcgcagaagtgatcgtcggtggcaaggtggtcaagtggaaggacaacgctgaggccgagattcgtaagcgcattggtgtgcagtcgtgtctcatcagcgcacgtcgtaaggaatggggcgcaatgcttccgcatctacgcgagagcatcatccctatctatcaggacgaactgaaccccgattgggtcgctgcgtatcaagccattctggaagaaacgattgaggccatcaaggccaacaagtcgttggtaaagcagctgcaagatgacaacgtagacgaactggacttggcaggtgcgctgaatccatacctcgcacgcctcgaaatgttcatgaccgctcccgggtctgacccgctgggcgcgaaggtgctaaagggtgacgcttctatcggtcccaaggtcaaggtggtggctcagattgttgatgagcacgtgactgatccggaggctaaggacggcaaaatcctcatcatcacgaactaccatgcgtccgcagatgcgctctacaacaacctgcctgcgcacctcaagtccaagtttatccgctaccacgcggagaacaaggatcgggatatcagcaagttcaagcgtgacccagacatcatcggcatgatcggtgtggaagacagcctcggtacgggccacaacttccagttctgctcgcgcatcgtgcgtatcgaaaccaagtggaaccccggtgatttggagcaggccaacgcgcgtatctggcgtcctgatccgaagaacatcggcagtgaagcacgtactgtgttcattgattgggtggtggttgatcgcaccatcgacgtgtgcaagtttgctcgtctgatttccaaggtcatttccaaggtcaagtttgacgaagcagacaatccgaagtacgacgatctggaagcgctcccgatcatcaagatgaaccttgacacgatccggtcgctcaactcgatcacgaagcatctggccgcgtatcaccaagaatacacgacgtacaagaacatctacaacaaggaaatgaaggagttccgcgagaagcacaaggataccttcaagttcaagcccattgagaacagcggtgaaccgctgccgggcggcgcaatgatgcgtcacgttacctatgtccctgaaatgcacctgccggataccaagcaacttggcatcgtgcgctactccgactacgtggattcccacgcgggcgagaatcagggcatcgttgactttgacaccgtaggcaagtacgtccacacggaattcggtgacggcaagatcatcggcatgagcggctcgaccttaaaggtcaagctgaaagatggaactatcatcaagagcatcaacaagctcaagacgttcatcatccccgacaagaagacctatgacgccgacggagacaccatccgggatcgcatggctcacttgatcggtgtgcccatgaagaaggcgaagaagaaaaaggaagtgcctgtcgaggaagctccgaagcctgtgcagaaggtcaagcgactcaagacggttgaagaacctgtcgaagagaagcccaagaaggccaagaagcaggaagaggaagctcctaagctgcgcacgctcaagcctaagaaggcgccgcctgccccgaaggtcaagaagaagccagaggtcgatgctgaactggagttctttgttgaggtggcctacgatcaagtcaccctcggtacgtacaaggatgaagcggacgaggatgaagccgcagttggcgtgctggagtcgcttggtttcaaggatacgggtgcgtactccttcgctatcatcaagactcggaagcacttggttaacttcctcgaagtgctgcaaagtaagttcgtggtgaagccggacttccttgaacgactggaagacctgcaagccttcttcaacaagggaccgaagaacgcattcaacgctcgcagtgcgctcaaggcaatggacgtgcgtaacttctggcgcatgaagcgcaacaaggcgggtgccaacgaagtcaggccgtatgctgtcgtgctcaaccacgaactgcacattgccttcgcgttgtcttccaaccagcccgcaaatcgcaaggtggcacgtcaagtgcgtgtaccgggcgtcaagtgggattcctcggatggcgattacatcaaattcctgcccaacaagggcgctgtaacttccaccctttccgaactgtccaaggcaggcatcactgttgccaacctcaaggacgtgaagaaggtactctcggagctcaagctccacaccccagccaagaaagaagaggagtaataccaatgctgtccaaattccaagttaccaaggtgcagcaggcgctggtcaacctcggccttgtggtcgaaggctacctgccggagggtgaatgggacgctatgaccaacaccctgtactggcgttacgccaccaacaccccgcctttcgtggcagccaacgctatcggctttgtgccgggtgacgtgtacctgctgcatccgggtgtcgtggaagcggtaggcggtgccgaggcgttctacgatgagaatttcgtcgctcccgtctcggatgaggaactggatgaagaactggatgacaccccggctctcgatcctgccgtcttcgcagccctgaacgccgctgtgccggaagccactgacctgcctccggctgacgatcagctgaccgcatcgcagactggcctcatcaacgaagccccgtcgagcgcggagccggatgctgcccagccgtcggtgaacgctgctgcacagaacgctggcacccagcaggaagaggcagaggaagaagagtacgacgatgaatcggatgatgaagaggaagaggacgaagacgattcggaagatgaaggcagcaccaaggatgaggtgaccgagccggttgctccgccaactggtgctaagaagaaaaagaagaagcgctaacccttcgggttaagcattgaaaggggcgtcttagggcgcccctttctcgttgctggaatcctgtaaacgataactgtagtgtgtatgcaagcgtaccatcctaacaggagttttgaatgccctttcaacgggtgaaaaccaccaagttcaagaacaaggttccttcgcatttgcgggaactgcattgttcaccgtttgacctgagtgttccgtatgagccctcgaccaaaggcaagcggtgtctgattgtaacgggtcacgtttcaaggcacgaccttgaagcgaatcgcttgctttccagcgctgaggacaagcacgcgctgtcggtaactctcgaaatggcccgcaagtgggccaggcactttgccaaggatgggcagtcggtagagaactactcgttctccactatcaacttcaactaccacaagaactatcacctgtcctccgagcaccacgctgagtctgtccgcctgtcggtcaagcgtgtgaaggagtacatcgaagaggtgaagccggacatcatcttggtaatgggcgactctgcatcgcgtcatctactcaagacgaagaccggtcacatcaaccacggccttgtccacaaaatctctgtcggggatactgactacaaggcgatccctacgattgaactgtctacgctcactatggatccgtatatggagaatggtgagaagtacgagattgccaaaaccaatctcttcatgtacgcggttcggacgatctccagcatctacctcggcaagccgtgcgtaagcttgaagggcgtgaagcccaacgcggtattcgtcaatacgatgaagcgcttcaagaagatgatgaccgaggtgtccgcagcctctgccgtctctgtcgatactgaaaccatcggcttgaaggtgctggacaacgacattctgaccatccagtttgccactagctccgagaagggttacgtcctcgcgctcaagcacaaggactgtccgttcaacgccaaggaactgaaatacatctacgcggagctgcgcaagttcttctcgcagaagcgactgccgcataagaagtggaagaagcagccgtatctcatcatgcagaacggcaagtttgacttgcgcgtgctccgagaagacctcaaggttccctgcatccagatgccggtatgggacgtgctcgctggcgagttcgtgctggatgagaacctcatcgacctccgaatccacactgacctcaagggtgcgtggggcttggaagttatgtcggcccgatacaacaacacgtggtatcagaccgctgaattcggtaaggcagatcgcgtcaccatcaaggaagtgtcgctgaaccaagcggaacttgactactgcgcaatggacgtgcagatgccgttcgctatccatctggcccagcagaagatcgcacaggcaatggaacacgaaggcggaaactatctggcggactaccgccgcatgatgcttgtccagatgagcaacatggtgcaccagctttcatccatgaagcagcgtggtatgccgctggatatgaactacctcatgctgctgcgtagcaaggccagtccgctccgcaagatgattgttgaggtggagaagaagctcaaggaaatgccgaacgtaaagaaggccaactccatgttgctttcggaacggggcgcaccctccaagggcctgtttggtgcagtcactagctggatgttcgacctcggcaagtctgctcacaagattcttctcttcatcgacttgctcaagctcaagcccgtcaactatggcaaggatggcacgacgcctgcgattgacaaggtgttccaaggtgtctacgccgacgtgccggaagtcgcagtgctgactgaacgctcgaagatcaagaagctggatgacagctacggtaagggcatctggaatcaggtcaaggcagaccctgacgtgaagaaggacggacgtattcgacccgagtacggcttcctgctggtgactggccgtactaattgtaccggtcctaacctacagcagattccggagcacggtaagctggcgccaatcatcaagcgcctgttctacgcacccgagggcacgctgcgcatcaagttcgacttctcggtgcacgaagttcgcggctggggtatcgtggctaacgataacgtcctcctgagcaccttcaacaacatcaacgatcttgtgctgcgcttccgtaaaaagaagaatcccactgaggcagacaagaccgaggtggaagtcaagggcgacatgcacaagctgaactactcggcgtttactggcgtgccggtggagaaggtaacgaaggaagaacgtcagggcgcgaagggtattaccttcggttcgatttacggccagtcggtgaaggctcttgccgagacgttgaagaagactgtcaaggaagcgcaggaactgactgatcggttcttcaagaagttcagcatggcgaagaagtggctggatcgagtcggtgaacaggcggtcaagcgtggttacgttacgagtccgctgggccgtcgccgtaacatgtgggcaggcatcctcggctacgagcgtctgcacaatgcgttgaagcgtcgtggtcagaacagcccgattcagggtatgtcgtctgacattgcaattgacgcagcccgattgatggaagaagcgatctacgatttcctgcttgatatggatgaactgccggaagagtgcagccgtccgccgatgggtgtgtgcgcaatggtgcatgacgccacggaagccgaagcccagtatcgtcacgtgatggcgctgatttggatgatggaatacttcgccatccacggtgtccgcaagttcctcaaggacgtgttcgaccttgaaacgcatgtggacttcgcaatcgaattcgctgttggcgcactcggtagcgaaatgcgcaagtgggactggacccaggagtgtctgtacgacattatctataaggcattgcaggatcagaaaaacgaactcaagttcaaggtcgatcctgacaccgagattctcaacatctacaagtggggtgccaagtatgcgccagaactgcgcaagcgcttccccctgcctgtcgaaccggacttcgattatcctgccaagcgtaaggaagccaagaaggctaccgacaagctgctggacaaggtaaagaagaagggcaagaaggacaaaaagaagaaggagaaagcatgattgctccaatgactgtgcgcgtaggggatgaggaattccctatgcgcgacctgtttgccagcgaacagtcggtgtttcagcagcagattgatgcagttacctcagcgttgcaggtcacggaattcgatctgctgcgccgagcagagacgctattcaatcaacgcttgcagcaccgattctccaagtcgcagaacctcagctacgaaaagcgagtctaccctgctttcggtccagaagaattcatgaaggtggcggctactggctgggcagaagcagacaagtccatgtggatggaagccgcccgaagggcttatctcaacgatgccatcaatgcgctcggtggggtgaactactccaacgttccttgcccgcaccctgacccattcgtcacctacacgcacggagcgaacacgggcggatggtctaccaacggtgaccggtactggacagacttccactgccatgcgtgcgtcaagagttggcgcatggaggaaacctacaatccgaatcgccattcgaggtacggcctagatgaaagcgcagctgtctgaaatcttcctgagcgttgagggcgaaggccctttgctgggatgccccatgttgttcattcgcatgttctcatgcaatttgacgtgtcctgggttcggtgggcacgcaggtaagcagcagtatgaaagcgttgcttcgctgaatgacgtggtgcctgctgctaccgggtgtgatagtgcgtatgcgtggcatccttccttcaagaatcttcggcagcccatcactgtcgaggacatggtgcagcagatcatcgctgcactgccgggaggcaagttcttctacccaagcggcactccgatcgttctgtgctggacgggcggcgagcccctcatgtggcagcctttcattcaagcagtgatgacgcacccagatatgccacctgtggatagggtgctgtttgaaaccaacggtacgctgctgtggtcgatggatcacaacaattggtcgggataccccactgtccaactcagcatcagccccaagctgaccaatagtggggagacgtgggaacgtcggtacaagtacaaggcgttgatgagttacgttgagcacattccggctaacgatatttacctcaagttcgtcagcaatggcagtgaggaatccttcgaggaaatcaatcgttggctggatcaggtcaagactgacgtgcatgcgcagatggatattgcgggcattgacgaagaacacgaaatgtatgatgacttccacacgcacatgcacgaccgcaggatactgcccgtgtacgtgatgccggaaggagtctacaaggagcaatgtagggaagtgcaaggcaaggttgtgcaaatgtgcatgcagcacgggtacaacttcaccccacgcgctcatcttgaactattttcagagctaattgggacttagtatgaagctgtcaatgatcgccgccgtgtcaaagaacgattgggttatcgggcaggatggtcagttgccttggcacatcccctcggaccttgagttcttcaaggagtacacgcaaggtaaggccgtaatcatgggtaggcgcacggctcaaagcctgcgccgtgcattgcccaagcgaaccaacgtcgttatctcttcgggatacgaacgtgaaggattcactacggtccgtaatttccttgcagccctagatgctgttcctgctggtcaggacgcagtgattatcggtggtcatcacgtgtacgccaccgcgatgcctgtggtatccgaagtgtgcatcagttgggtccatcacgttcgcccgtccgcgccagatgctttcttccctgacaccttccgtgacttcaaatggaaggctatttctgaggaactcatccgagacacgcgtgacgaatttccgtacactcggacgatctaccgcaaggtgtgacgttccctgtcctgtaaatatagatacacgcaataactggagaagtcatgcaggctaccgtcggtgtaaaagaactcaccaaagcaatctcgcaagtaaagaacctgactggcgcggaacacatcagcatgatcgcggaccccgctggtctgcacgtgtgcgcggctggtaacggtgtcaacgtgtcactgacgcttgaagccgaagtgcgtaacaatggcaaggtcactctggatcacctgctgctgtcgggtgtcatcaagggacgcaagaaggtcgaaatgaccttgaagtccagcgacctgagcttcaaggaagtggatggtcggaagtacagcggcaacatcgtcgtgctgccgtttgaagacgtgatggtcaacgatgcgtcgagcaagccgatcaagatcagttcggacgcacaggccaccctgaatcaggcagtggagttggtcggcctgaccaacatctacactgacgatccgatgtatgtgtgggtcatcagcacgaagaaggcaactacggttacttgcttcgatgacttccacatggcgcattaccacaacccgagcatgtcgctgggtcaagtggagttccagctgtctctcgccacgttcaagacgctcaacaccctgagcaacggcaagagctacaagctggaattgaacgatggtacgctgacggcatacaacgatgcgttcaaggccaacatgccactgacgcagagtgaatcgtcgctgaccccggatcaggtgaagcagctgctgtcgaacctcaagaccgatggttacttcgaggtggagcgcgataccttccagaccattctggagaacgccgctagtgcgtatgaaggtaacaataccccgttgaccatttcgtctaacgccaagaagaagctggagctggcgatcaagggcaactacgtcaacatgcgggaagtgctgccgaacaagcacaagatcaagaagccgctacagctggacccgtccctgatgctggacattatggagcatgtggaaaccaaggaagtgaaggtggaaatcgtcaccgacaaatcgctgttcattcgtcaagaacttggtgctgctaccgtcgtgtacgcgggctccctgatctaagatgatagacctgtcagttgctacattccaaactgactgcttctataggatcggtgcttactacgtcctccttaacgtaccttgcgcgctacctgtccacgtccaacccagcccgcatttgcagctgggttgggttcgtgtgaatacgctgcacctcggtgaaggcgggatgcaggtagggtatgccatcgaggctacgggtaaggtaaagcgagacacctatttccttttggcggctagaaagtcagtagctaaggttccgatcaaggaactagagaagcagaaaggatacccggagctacgttacaagctacccggcatcaagattctgaccacaccccatacagtgcttttcctgagcacaaaacctttagacattacggaacatttggacaacccatgagcaagactcttgctggaattccagctacgaaggaacagttgaaggatgcgtacacggtgatcgtcaatcacctgcgcagtaacaccaagaatccggaactgctggcgaattttgttggcaccgaagatcgcgctgtacgcgctctgattgaaacctgtctgagcgatgatgaaatctccaagctgctcgctccgatcgtggctgtggaattcccggtcagccgtcataagcccaaggcacgtggtcagcgtgtccccgccggttccgttactcagggcccgatcactgtcaactcctgctgcccgcaccacctgatgccggttcgataccatgcacacgtggcgtacattccgggtgacaatggcggcgtgcttgggctgtccaagcttgctcgcatctgcaagctgctgggtcgccgccccgtcctgcaagaacagcttgccgaagacattgcggatgtgctgtttctgactaacggcgaaggcgcattcccctccctcgcaagtgctggcgcggctgtgtcactggtcggtatgcacacctgcatggcctgccgtggcgttgaagagaacgcgctcacctcggtcactgctctgcgcggcgactattgggagcctgaaatggaacagaagttccagaactcggtgcaaggtatcaagaccaccaatctgcggtgaccaacatggccggtaagcgcaagagcacgaaaggcatcaagttcaagccgcagcccgtggcgaaagcccctgctgggttggaggacgatgcaacgtatcagaagtacacccgagtcgttaagaattgcacccttgacattccggccctgtacgccgagttgaccaccatccactcctcgcgtcccatgcgtactgctactacgccgggaccgaagaaggctgccaagttctccatgcaagagacggcccatcgtagccgtctcgttgaaatgcgtcagctggctgcatacgaattcgcggtccttgatatgggccacggcgcaattcaggatcacattacccacaagcaccccgacctgatcggtgggcgcactgtggatgatcggaatcgcgctatgcgtcgtctgctacacaagggcgagcgcagattgaaggaattggaagcagtcatcgaagccattgattttgtgatcgaagacattgataaggccggcttctccttgcatcggaccatcgaggctttggccatcaccaataagggggaatacacctaatgggtaagaagattccctcggtaactgtagtggcgctcgaccgcttctacgtgccggagaatcgggttgatcctgagaagctagagaggctgtaccacaagacggtgttcaacgacaacgggtgtcgaaagtgtgagttccgcgaggaacgactcactgacgaatgccttgagtgtgagaacctcgttggcgacttcactttctggaataccaaagaaattgatgggaagccgcacatcggacttcctgttgggcaccacaaggccctgagtgagttgatggatgggtaccgcctcatcctagacgaacgacgtgccaaggggcgtaagctacatcccgatcttagcttcgactacaagctgctgcacaagttccagaagggtgctatcaaagacctgaaaagcacagggcacggtcagctggagagtccgccgcgttcgggcaagacggtcatgggcactgcgctgattttcaagaagggccgaaaggccctaatcctcgttcatcaagaggatttggcagagcagttcatcgaaacgttccgcagcaagaagccgaagttcaccaacatcgctgacattgagaagatggagaagcgggagttggtgggtatcgcacgtaaatacgaacagttcaagcagtacgacattgcggtagctacctatcagacgttcctgtctccgggtggccgcaagctgctgcggaagattcgccgcctgttcggcattatcatggtggatgaggtgcaccgtgcaggtgcatcaggttacgccaaggtcatcaactcgtttgagtctcgcagccgctacggactgtcgggtacgattgagcgaaaggatggccgtcacgtgctgcctcgttatatcatcggtcctgtcgcgcacaagactgaggtggagacgatggcaccgaagatcgacgtgatggattcgggcttctcaagcaacaagaactacaatctctggacctacgccatgaaggcgttggaaaaggatgcgaagcggcaagccttgattgtgaacgaggcgattgcgatgatgaagtccgatggtgggcgtagcatcctgatcccggtcacgtttgtcaatcaggcaatccagattcgtgatgcgatcaatcgtaaaatgggtaagaaggtcgcaatcgaattcacggggcgacagggcaagaagcaacgtcgtcagatcattctggatgcccgagagggtaagtacaagtgtgtcattgcgatgcgccagctgcttacgggtgtgaacgttcccatctggagtggcctgctagagtgcatgcctatgaacaatcctccgaacttcgtgcaggagttcaatcgagtttgtacgccgcacccaagcaagcctgccccggttgtcaagttcctcattgatgacttctcgccgtctcggaattgcgtcatcaacatgtttgacgttcttgtaaactacagtcagcaacggaaggctaagaaacaaaagccgcttgacttcacgccgcagggccttgacgtgatcgcacgtcatcgggcactgaaaggcaacaggtatcaagccaagttgaagagagcgggccaatgggatcaggtagacaacccacgcccgtaccgtaccgattactaggtgacaagtgaagctaaccctaaagaaaagtgagcttcggaatctgcggctggagcgagtgcccctgccgcagttctccaccctcgacgtagacgcggaacgcatcgtctccaagtcaggaaatggcaaggttcgtaccatcaagccaaaggcacagttggacgcgctcgccaaattcgctccgcaactaatttcaaactatacgttctgcatcagcggcactggcaccgacagcactgccaagttcgttgctgcatggatgtacgcccagcttctgaccgcctacaaagagcttgcctccaaagaggcgttcgcctttggcaagccggtgtggcacaccctgacaggcagctttaaggatgagtaccgtgatgagcgtaggcatggcaaatccaagccaagtgctttcatcctgaccaacgttccatccgacagtagccagatcaagatcgagaagctgcgagacattctggaactgtataacgacgtgcctcgcattgtcgttacaacgggtatggaccccgttgaattcttcaccaacaaattgcacttccccttgaatggcggcatcatggttgccaacaagagccggcgtgttactgagtctatctaagtagactcacaggagattccattgagacttttgacgttgatcggtgagaagcaggcattgaaaggcatctgctcggataatgagaaggtgtcgagtcagctgctcggtacactacgtgaggaacactttcacagtggcccatgcaaggaagcgtttaagcgagtgctgaacgttgtccgtaagaagggtgaagtgcctgagttcggtgaactgtgcactgacccagccctgtcggagaacacacgcaagattctgacgaaggaactgaacaacaagaagagcaagataccgaaggacaaagctgctgcacgcaacttgatcgctacgctggatcagtatcgcaagatgcgcggcctgtacttcaatgccaaggaagtgctggagaagctggacggcgacaaggttgacattgacgaaatgatcgactcgtctgccgacgttatcaccgggctgcgtagtagcgcaggtgccacggccaaggtgtaccaccttggtgtcggtaacaacatggatcgcctcatcaagaacatcctgtacggtgagaaggcgtccatcattccgactggctaccgtgcatgggatgacgtgaacggcggcatcctgcgtggttcgttctttgttatgtcggcaactacgggtggtggtaaatcgaccgtagccaatcagaccttgatgaacatggccgaacgcggtcatcgcgtctgcctcgtcgcgctggaaatgaccagcgagcaaacgatgatgcgaacgattgcggcagagaccggcatcgaagtcaacaagatcgcccagcagaagctatcgaagggcgagaagaagaagatcgaaaaggcgtacaagaagaagcgcggtcacttcaaggaaatcaatgctcggtacagtatcttctctcccgaagaggatatgtcactggaagagattctgttcacgctcaagccgcacaagttcgacgttatctgtatcgactatatctccctgttgaagggcgtggatgcagatgagaactcggtcaagcagctgggtgctatctcgcgtgcgggcaagatttgggcgaacaacactgagactgtgctcatcatgctggcgcagctttcggaagaaggcaagatcaagtacgcacgatccatcgcagaaaacgctgacgttgcatggctgtgggtgtacaccgatgagtcgcgtgagacaggcatcatcgacatccgaactaccaaatctcgaaaccttaccccaatcaacttccagctgctcaccgactacagcatcatgaaggttacagaccttgaggatgcagatggtaatcgggatgagcgtgcgcctgagcctaccaagaagggcgacaagcgacgtgcagaactggatcgtctgacggaagagattaaccttcccgacgatggagacgacgactaaccggagccaacatgaaagtacgagccgaagtaattacccgtgagaacgttgatgttgaaatcaacgtcaacgacgtgttcaccaacatcctgtccaagctgcgtaccgagagtaacgttccctctgacgcctatatcaacaacaatggggagtgggaatcttgggatgaccttgggggccgtggcagtggtcttaccaccgtacaccgtccggcgaccgctactgagcgctccctgtacgaatccattgcacaggttcggtcctacactaacgcatgagtaccgaagcgggcggcgaggttacaccgtttcagcctcgtgaccattcgcccctcctagcggaactaggaagtctggacgcagccgctctcatggagcggttgggttcgggaagcatggtgcgggcagatgaggatgaatacaagacgcagagcaagccagttcggtctcccaacgtctactggcaggctccaaccgattgttggattttcctttccggaaaagccgccgatcaatttgatgtaacagggcagcgcgtctggaagactgaggaagaacgccagcaggccctcatgcgcgagctagtcattgacgaactggatgtctctgacgaagacaaggaatcatttaccaagacgttggagcaaagctccaacgcgttctacagggagctactgcgactgtgtgcggtccaactcggatacaactccgcgacggacaagatcatgcagacgatgcaactgctccttgacgatccgcatttcacattgaaggacgtacagatcaagtctaccctacgcgacctcgtagacctcaagttcacggaagctatagccaagcagcttaggctaggcgacgttaacggggttttgaacgcacgcatggcagccttggctcaattcattccaagaaatcctgatgactcaaaactgtctgagttgcgcgcactacttcaaatgcgcggacccgaataagcaggcgcgtggcagggaatattcctgccacgcttggacaggtatcgacttctcatcgtcgggcctgagtctagaagcaacgaacgagtacaagtctaaacaaatagcctccactctcattgagccttcggccattgacgagacggaggcttttgctgctgaactcggcctagaaaagatgtgggacgaggtgctgaactccaagtctccggtcccgcccgatcttgtggtggacgaccgtgacttcaaggaattcggtaacttcttcgacttctgtatggcgaaggacggcctgaccgcaggcactcccttcccgaggcagctgtggctaattgccaatctcctaggcgatgcttgcggcaacccaaagtgtacggacccaaagtggttcgatgtaaacaacattcctgtcgggttgaagaacatctacgacctgctggaaatggtgacgttctatcagaacggtgtctgtccgaagtgtaagcagacgcgagcacagcagattcgcaagaagattgtacgccgacctaacgaaggttacgcgtgcgtcggtcagcgtgcgggtaagtctaccacgctgtccatgctgtccagctatatcctgcacaagtacctcaagttgcagaaccccactgcggtgttcggtctgttcaagggctcaatcctgacggcatcgttcgtggcgctaaccttcggtcgtgcgcaaaacctgctctggaatccaatccagaacatgctgatgaactccgagtggttcaacaactaccactccatgctggatgatgtgagtgcacgcaagggcatcgaactctacaagaagcccggcggtatcatgttgcagtatcgccatcgtgacctttacctcgcaccctcgggtccgtctaagcgaacgctgcgtggtgatacgcgattcttctacgtggtggacgaggccggtctgttcccaattgacggtaacgtggacgacaaggaacgtatgtcgatctttgaaacccacacgtcgctaaagaactcgaccctgaccctccgagaagccgcacgtcgtcagctgcgcaagggctacagcaacatcccgaccgcgttgggtgtctacatttcctcgccaatgtcgcaccgcgatttcatcatgcgtggcgtcaaggaaaacgtcagcaacaagcgcgcgctggttatgcacctgccgtcgtggaagttcaaccccgaccttagcgagaagtcgctgcgccgggaattcaagaacgagcctgtcaagtttgaacgagatttcggcgctaacccaccgctgtctgagaacccgttcttcgacattggcgagcacctgcaatcgacgtttgccctcccggccaacaagatcgagtacaagtacaagacgttgaaggacccgcgggctgccctaaagcagaagtgggcagaaatcattaccacacgcaacgtcggtatggtgcctgtcagtgctatggcactcgacgcaggcgaagtgaacaactcgttctctatggcaatcgggcacgtggaaacaacgcgagagccgcgactaggtttcgtgcgtaccgtcaaggtcacgggcatcatcgaggtggcgccaaaggttcgtgtctctgcgatcaactacaacaggatcgccgagcgcactctgtacccgctcatccagaagttcaacgtagccgcgctggtttcggatagatggcagaacaagaagttcctgcacgatgctatggcgaagttccccaacttgtatacggagaactacagcctgacctatgaggacattgtggagttccgcgatcacctcatggacgaacgccccggcatcctcctacctcaccctgaaatttccttcgaggaaatcgacaggatggagacggcgacggactacccgcactgcttcaagtacaagccggtagcccatacgttcttccagatgcagacggtgcaggatgctggtaaccaagtgtccaagggctcaggtttcactgacgataatcttcgggcagtgttcctcctgtgcaagttcctccttgacccagtatggtgtaaggcccacatgaagggaacctccatccgaggctctggcggcattggtgccgtggcaggccgttcgggtgctgtggcactccctagagggtccattatgcaagctggggcctacgccgcgctaggttctcgcggcttcaagttaggctaattttactcagtaaacgaggacagttccatgaccaaaacgatcaatcctttctccgaccttcctgtggtcgctcctgcggctccggctgctgaaactgccaccaccgcgccggtcgaggaaactgccaccatccgccccaacaagctggagaccaccaacaggtgtccggttgatgggcgtcctatgcagcgagtcatgtgtggcgtgaagggcaccgatacggaaactcacgcctacgcctgccttgaacatcgcgtgtgcctgccggtacccaacagcgaactctgaccatgtttgattccaccaagcgcatttcagttaagcggggcaggggcctcgtcactgctgcgcagatgcccctgatgggttcgggtggcttgagtaccagcatgggtacttacagcaacctcaacgtaagtgcgatcagcactttcttccaacgaagtgaaaccctgctccgaggcattgctgacgagcaggaattggcgttccgtactttctaccgcgacatatacaggtacgacgttgttgccggtaccgctgtcgaaatgatgagcgtgcttccgttctcggacttcaccttgcagggtggtacgccgaaacaactggaggtattcaaccgcaacatcgacaacctcggtatgcgcacactcttcccacagctgagtgtggactactatgtctccgggcgtagcatttcgagcatgctgtacgacaacgacaagaaggtcttcaccgatctaatgtcgcacaatcctgacagcgcagagattaccccgaatcctctgtacgatcaggagcctcgtatcaagtgtcgtgtcgaccccgagctacgccagttcctagactcccgtgatccttacttcacgaagctcaaggagcgcatgccggagagtgtgttgcatgcactcaagaacagccatgtggttctcgatccgctgactaccttgttcctgccgcgtgctctgacccctcggtctactggtacgtcgctgtaccgccgcctgattccgatctacctgctggagaaggtgctgtatcgcggtaccatcactgaggcggctcgccgtcagcgtgctatcggtcacatcatggcaggctcgcagtattgggaaccacaggacgctgacttgcagaacctgctggccatgttccagcaagcggacctcgaccctaacggtgccatgatcgctacgcgtaacgacgtgcagtatcaggacattcgaccgggtggcgacttctggaagtggacggacactgcggagcagctgacgccgttcaagatgcgcgcactgggaatcaatgacgcgctgctgtcgggtgaagcgaacatcagcacacaggaagcatcgctgtctctgttccttgaacagttgcgtacctaccgagactacgctactcgccgcacgttctacgaccgcatcttcccgatgattagtatcgtcaatgggttcaagccgtccaagcatgaagagtccaagattctgaccgagacggccaatggcaacattgaccagctggacgaagagacggaagacgcaatcatcttccaccagctgggcgaccataacgtgctgattccccaagtgcgttggcacaagcagctgcgccccgaggctgaccgtgagcaccttgacgtgctgaacacgatggctgaacgtggcgtgcctgtgggccttcggacttgggctgctgccggtggcctcgacctcgacaaggaagtgaaggaactggagaacgacattcagatccgaaagaagattcagtcgattacgggtgtgctaggcaaccaaggtcagcagcaggatgaaggccctgacgacagctatcaaggttcggaagcacaggcacatgtcgctgctatcgtggatagtatgagtgataccgaaatcgctgctgccgttcgcatgcagactggccagtatcgggtacccatcctcgcacgtgacttcggcggtgcatctgagattatcggcaccagccgtactggcaagcccaaggcagtgcttaatcaggctcgggccaaccgccagtacaacgaacagatggcaactgttattggacgccttaccaacgcggatcatttcgcaaaggtgctggcagatgcaaagactaagggagtcccctaaccgggctccctactattgaggtatcacagatgagtaaccgcattctactggaaacggcaggcatcgagcacatcgacctgactccgactacgatcaatccacttgacatgcacaagatgctcaagcggaaagacattgtgaacaacggcgctaacggccttgtggtcgcctcggccattagctcggacgttccgcagggtgagacgctggacgttaccaactggctgccgagcgctgccaaggtatacaacatcagcccgaacatcgacgactacctgatggtccctgtgttcaccattccctcggagttgccgaaccgtaacggtgttggcttcccgctggaagaactggtagcgttctctcccgaagacggcatgcagtattacaagacgttcaagggcaagccgactcactacgagcacgccaacaaggactacacgattgccaagggcgtgatcgcagacgtgtacctgcgccgactggatggctggagcgagaacaaaatctacaagatggtcgagctactcatgtttgaccgcacccgtgacgttgacctgtgcaacgacattctcaagggtcggatcaacgcctactcgatgggcgcgtacgtgggcggttacacctgctccatgtgtggcagcttgatgggtacgtgcagccatctgcacccggacaagaagctcgacttctacaagctgggcaatcaccttgtctaccgccgcgtcaagaagccgcgaggttttgagacgagcgctgtcggaacccctgcgtacagcgtagcagcacaggatactgtgatccccatcaacaattccgaaacactgattacgcgataacaaagaggggcgtctgcttacgggcagcgcccctctttgcgttttggcatcctgtaaataacccctgacgacctagggatttttctactatggatttgactgtcgaacttactactgagccctcccgaaaaccattcaacggacctgtccaaacggagacgtggtgctcagatggagttccggtggtagtggtttggtacgccacccaccaatatgacgggaagtggtgggcaatcgtgacggacattgaacttccgaaacgattcaagcgcttccctcgcgcagtcctgcacgaactactgcgccatgctatcaacgcgctaggcaccgagtacactgtgctctacccctgcgcccgtaaattgctgcgccgcgttgaaccgctctacatgcgcagtctcattcaaggctacaagctcggcatgcagcacctcaagttctcgccgaatggtagcaagcacccatttatgattctgagagaagccaatgattcgtaatccagtgtttgacttgttcgatcttgctccacaccactccacgctcaagtggcttgaagaagaactggaagtcagcgaagcgactgctgacgataccgatgagttcgatcagaagcgcttgatccatctacgtcgcctgcgcgatttggttgcagccctcccgctggcagctacccgctatcagcagtccctgcgagaaatggaagctgcgcactcggaagcagtgtccctcaacaaggttgtgatggatggccttgcgaacacgccgggtgttagctatgagttcgtgatccacaatggagagccagtgttgaaggtggtgccgcgtgctcttgagtacaccgtggcgatgggcgaagcaggcgacaactacattcggtctgtggctttccaaggcaagttcaccctgcctcactctttccggtggcatgctctttgggaagtcatgcagaccgcagccttgaacccaactgttgagtacactgatggccaaacagcctgaaccggccaagccggaagtagacattaccccaacggacgccacgaagtatcctggtacgtggccgtgtacgatccctgcgcctcgccattacccgttctccaagcacgccaagttgagcacgaagatgcgcgtgctgatcctgcccggtcgcatagagtatgatcctgcaatggcggacatcgaagctgaggtcagcggccttgcacgcaagaacgacgtaacgttggtggctcacgactactaccgaggtgcttgcgaaatcatggcacgtcgcctcgggctagactacatggtcatcaacgtggacaacgacgatggtaggactctgcccaccccggtagcccgggacacgctcaacactagcgtatctgcgcgccgccgtgtcctgagcaaatccgatcttgtgctagcggtcacggatagtccgttcctcaccgcccttagcaagaccaatgccaagcgcaagtctcctctaacgatcaagaccttccgggccaagtaccacgattacattgacgcgaaggttaacgccgtacctaccacaactcccaagaagaagcgtaagaaaaagtcatgagcgattccgaactgtctccgttcttggcccgcaacaggccgtacacacccacccctgaccagcgggcagcgatggatcgcagcaagaaattccatgatcccctccgagtgcagaatggcgctctgattggtgaaggctctaccagtcagcgcttggacgaactcttaccctacgggtctagactcataaaggcatagtgatgacgatcccacaccacactaggaaagaccctccctcgtacaacccggttctgatcgtgctgatcttggctctaatcgcagtcatcgtttacggcaccttcatcaaggaacgtaacgaggcgcgtctcaacgagcacaacagccagctgtattcggagctgtgtaagaagcagggtggcaaccctctgtacgcaaacgaccctgaccatcgtacttgcttggtcggcaacactcccatcaacgtaatccagccatgactctcgacctgacctaccccaagtggttcgctcccattgaggagcagattcgtcacgaacgtgacaccttccgatacgatcaatgcgtggccgttcgcagccccttcggcgaatacgagcgcggcctcgccagcatcttcgggcacggcgatcctgttcctgaccgtactggcaccggcaccctgtcgcagttctgccatcagatgcgattcaacatgcacccgcatacggtgctcgatagcagcagtccttacttcggacagagcctgccggtgtacccgctggtcaccacgaagaaggtgcacttcaaatcggtgttccacgaactgatttggatgctcaagggcctgaccaacatcaagtacctgaccgacaacaagatcacgatttgggacgagtgggcagatgagaatggcgacctcggccccgtgtacggtaagcagtggcgcgactttgcaggcgtggatcagatcacggaagtactggcggaaatgaagcgcaacccgtacagccgccgtttggtcatcagcgcgtggaatccgcaggacttgccggaaatgaagttgcagccgtgccacatcctgttccagttcatcgtgcgcaacggtcgaatgaactgccacttcttcatgaggtcgaatgacgccttccttggaacgcccttcaacatcgcacagtatgcgatgttgaatgcgctggtcgccaagactgtcggtgtgcagccgggcgagcttgtgttgtcggtaactgacttccacctgtactcgaaccatctgtctctggccaagatgcagctgacccgagaaccgtacccatatcccttcatcaacatcaagaccgctcgggacaacctgtgggattacaagtttgatgacgtggaaatcatcggctacaagtcgcaccctgcaatcaaggcggacgttgcggtatgacggcagttctcactgaactggacacccgactggctgaggcaggaatcaccctgtctcagttcgcacagcgcattggcattcccgagcaggctatccatgccaacatcgggaagggctggtgcatgattgaccccttgatggccgctgccttcgcccgatattggggaaccacccctgacttctggctcggtatcagtcatcagcagaacgtagagcgtgctcgggaaatcctcccgaggatgaccttccctgaccacacaactttgttgaacgggccgccatgcgatttcgtagacatcaagatcggttaactgcggaagtcccttgtccaaccacccacgatggattcgcccgtgtattcagcgagttcatgcacgaaagcctcaaacattaccttcgggaagtcgcatttcctgccgccaatttcagtatgcgcaaccgtgtgtttgccaacgagcatgacgcccttggcaactccgcgaatctacaacgaacattgattcagacagtgacctacgagtgccaatccctatcggcctcaacagtcatctacgaattggtccttatccccactggcaagaaagcgggatggaaaggatggttgtatgatcgcacccataaaggagaaacggtagccgcataactccagacaggattgtcgctaaccggtacccataatgaaaaaattcaccgcacctcctgacaatacttgggtgcagcgacagttgttctcttggtggaaggaagcaatcgaccacggtggcatggaccccgtggatcaatcacgtaacgaattcctgcgaccttccgccctccctttctgtcccctcaaagtcggctacaatcgtgtggtcaatggcgtggagacagagcgctactccagcttcaacgaaagcttctacacctccatcggtacagcggttcacgaactcttgcagaacttcgtgggccgcttggccgtttccaaaggcgtagaactcaaggtcgagacactcggccattggcactgcaaggcatgtgggcggaagcgtagatttaccatctacaagccatgcaagtgcggaggcacgcccgagtacgaggaaatttctatccactggcgtaccaccgttggccacatcgacaaggtgatccgggtgggcaactgcctcttcattcttgactacaagaccacgggctctatggcgattcgcaagcatcgcgctggcgctcctgcgggcgaaccttactttccatatccagccaaccgtgcgcagatcatgcgttacgtcggtctgtttgagaaagtgttcgccaaggagtttgaacccggaggccgcttcgagggcaccgtagtcatgggcgcaatcttggcttacgtgagccgcgaaactgtccgtgacgtggcgttcgtgtatctgcccgctacgcgcaagcgcaagaagaaggaatatcggaaggcagtgcgggatgacgccctgtttgtcacgatgaaggaagcggtagccaagcgttccaagaaactcttcattgagttgatcgaggaaaagccctgcgctgatcgggatgactacgatcagaagatgcacagcagatacgatgagtgcccgttagtcaacgtatgctttagacgccgacaattactcaaacaaatcgacaaggccctaaagggtcagatcaaacccaaggactaacagtgactaatcccatccgcatcgcactctgcggcttgccgcactcgggcaaggataccagcgcagatattctcgttgatcgcttcgactttgtacgccttcggttcgctactccagtcaagatggctgccgcagaaatgttcggatgggatgctaacgatgaggaggacaaggacagtcctctgatccgtaacatcgcaggggactacctgagcaagcgcgacatttggcgcgatatggcggagaactacatcaagccacgtttcgggcaggacttctttgcgcgcgccctgactaaggaagcatcggtccactatcactctgacaacattgtagtgacggacctgcgcttccccatcgaggctatggtgttgcgacgtgctggctttaccgtcatcgaagtgcagcgcgaagaccagcccattgtggacggcctccacaatcatcgggtcgaaatccaagaccttagcaactacatcgactaccaaatttccgcaccctcgggcttgcctctggagaacctccaagacaagctggggcaggcgttgcagggaatcctcgtaaagatcaatcctgtaaataaacgctgagtattgaaacgtcccgctggagacatttgtgcatcaaggtgattttctgattatcaaaaacgggcgcaaaaatgcgctcgtcaagatcgtctctatcccgaatgaaggcgagttggtcgtccgtcgagaagagagcaaggttgaaggtcgtcggatcacagaaacggtgtccactgaatctgtaattctcaacctcggtcaaaacccacagccgggattagtgtacggctgcaagatcgaaccctacgttagctccgccgagattgacggatggggccatatccattactaccgcgacctagagcgtgacgaaaagaagacgatcaaacgggcagctgcgaagtcgtggaagcacctaaagaagttgggattggttgcgttcgcacccctgaccattgaagtgcgattggcgaagggtagcgaaatcggctactacaagattcacaaggcacaggaaactgacgtgctgtgcctcaagccccgtgagttccactacgatgaactggtccgtctgttctaccatgaggcaggccacggcatccttgatcgcatgatgcctgtcgagtatcgcgctcgctggatcaaggcgtacacccactacaccacgttgagcaaattggaccctgacgaaatccgtgccattcgggcgctggtggaagggacaggatcgctcaatggtgttgacggtgtggaccctgagaagctcgacctctgcatcgactcgattcattccaactacggcctcaagaagcgtgacattgaggaactgctggaacagggatacacacttgaggattactggccgacgcacccgctggacctagcggacaacgaagtgcccctcactgattacgccaacaagaactggaacgaattcttctgcgaagctctggcgatgcacatgacgggcatccaacttcccaagcgcattcggaccctcctactcaaaaccattgaagctaccaaggagtaacgccatgaccgggcatcagtcaaagcctgtcgcaactgcgctggacgtgcaccacactgtcaacgccaagctgaccaccactgcggaaccgggtaccattatttggagtccgagggaagtcaccctgagccctacgttacagcgtcagatggacaacgccattgtgcgctatcatcagcttcctgagtggtaccgacaggccgctgagaagaaggattgagaatgagcaagaagaaaacgggaggggcaccgtggggagggtggactcccgcctctgacttccgaagcggagccagctacaactttgttcctgcggcaagtgagtattcaaagcgcggaggcgtgcatatctatgtgcgctatggtcgaggtccgagccacgtaactgtggtggatcatgatagcgacttcatgcgtatcaagtgtcctgaccgggaactgctgatcgtagccaatggtcagcgtgcccatatctaccggcccatgcagggcacctacgacgagttctacaacttctcgccgttctgggaacattcgtccgccgaccttgaatatggttgcgtgatgacgaactacaccagctacatcggtaaggagaaacgctcttcgggcatccgtcgcaaggacttccgctacgggatcgaccagcataccaagatcatcgcagactccggtggcttccagttggtcaagggtacggtggactacatcgacccgaaggaactggtcacgtggtacaacgacaatgtggattggggcatggtgctggatacgccactggcgtccaacggccttgaaatctacactcggtccgccaaggtgcaggctgagaacacacgcatcatgatggacaacaagcggccgggtctggaactgctgaacatcatccacggtgcggtcggcaaggaaatggacaccttccgcaagatcgttgaacgccctgacattgatcgccttgcagtcggtggtatctacttcggttccatcctgtcgagtatcgaccgcctgtgcgccatcatgacaggtgggcagcgatacaagcactatcacgcgctgggtatcgccaacatcacgcagacgattcccttgatgcgtttgagtggtagcgacattgcgcccctcatcacctcggatagtagctcgcacctacaggcagctaacgggcgtaagtattacaagcccaacggcaccgaagcgctcccggaagtgctgttctatgctgacgcaggtggctatcatccgggcggcaatcagctgctcaactgcacgtgccccatctgctcagtagtgaagtacaccgacgttctaagcatggtcaacagcaacacgatcacgctgctgctggtgtaccacaatctgttctcgatccaaatgttccagaagtccctgtacgatcgggtggcgggtgtgcctgtcggcgaagcaaaggatgctttgcgcaccttgttcggtaactccaaggccaagcgcaagcagctgcaagagttcttccacacgttggactttgttgatatggtcaagacctcgggcttggctgatgcgcgaaaggaattcgcgttctacttgccgaagacggacagtgacacaggtgctaccaagactctgttctcgggcatcgaaatggaagagacggctgatcccacccgagacttggcgatcctcaagaagtatgaagacgcccaggctggtaggctcaagttgtcctctacccctgaacgcaagcctgccccaccgaagaaaaagaaggtgaagctggaagctgaggaaggcgcggctcctgagcccgaggttgtcgaacctgtcaagttggacaaggcaggccgcaagaagaagaacatcgccagcgcgaccaagatcggtaacaaggcgatgggtgtgactcgaagcaaacgccccggtaagcagaaggtcaagaagaaaaagaagtgaagaccatcacagacttgatggcgctttgcccgaaggttcagtacgagaaggcacgagagactcgcatcttgaatgccagcgccggactgagccgttcgggccttcgcaccatcagagccgtagtacagcgcgtcagcgacaagggcgcgcatgacaagcatcgggtagagattcagtgcgtagagcctgacactctactcggtgagggctacgtaaaggtgtggtgtgactgcggattccaagtcttctacggacaggaagtgctgctgactaagcagggtgccagtagcattcggtactctgacggcagcatgcctaacattcgcaatccgggcggagtcatgatgctctgccaccacactctgcgcatcgccttagcaatacgatccaagaagctatgagtcgcaactctgcatctatccaagctacaaagacagtcaaggaaacgatgcagggacgctggaatgatagtcagatgatgactgcattggaccagcttctcatgctggccgtggagcctatcatcaggcacacggagttctttgatagaaacatgccagcgatgctttgctggtacgcaacaaacacaggacgcaagattagttcggttgacaagcccaaggttctgcacctcatgaacctgtacttgttggccgacaaggctcaggataaggtgcgcttggtgcgccgaatgaagctggagagaaacatcctcttcttcatcatcaagcgcttctgcacgttggccaaggactatccgaaattggaggtgctttacgctcagaagcgcctgccgtcgcgtcggatagctatggagagaattgagcagctagtcggtgcgggtaagaacctaggtcgcgtgcttcaacgcgtcaagtcatgggaaaccgaagctaccaaattcaggaatcagattcttgaacggttcatgcggcacgccatgatgcaagcggtgaagttcaaccgggagaatccacgcactgaccttgaagacgtaacgcaaaactttgtgctggcggtgaacaaagcggtgaacaagatgaaccccgataagggaacgctcgctccttatactcagaactggatcacgaatgccaagcattcgcctacacagtctcatgagtacgggatcgcatactccctgtctccgcatgcaaagcgggctgtggctaggggcgatctacaactggtgaatatttcttcggactttgagactgaggaagtgttcaaccaaccggatagcacagatgagtttgagaaactcaccgaggaagatcgggcacagcgggtacgcctgctggcaaagattgctgacccggatggttttgcgcgccaagagttgggcattgaggaactgctgcttccgcatgaagtggtacgcatcgacgccaaacgacattcttgtaaacaataagtgattcaacaggagacccaactgtgggcagtaagttcaagcgagaaagtaaaaacgcaattcagggtggcttcggtggtgcccgcaagtctaaggattcgcagaagcgtttctccgaccttgtggagttccacacgtggccaccgaagaagtggtccgcgattcgtttcgtcggcccgctggtgtgcgaaggtctgcactggattgaaatcaagaagcaggacggcagcaagacttcgattccgaagaagtgcttggcgttcgatcccctgacgcagcagcgcgacagcacgaagaagtgcccatactgcatcaatctgccgcgcaagacggagaaggatcgtcagaagtatcgcttcacgatcaactactaccggaacgccatcatccgcacgctggctgataaggcaccgcgcaagatcaagatgaccgaggctgagaagtcgtgtggttacaaggacaaggaaagcgacagctggactccttgccgtgtgattcgcatgtctccgtcgctggtgggcaaggttgcacgtctggaagaactgaacatccacaaggttaaggataagaagtccggcaccaagaagtccaagagcttcgacattggtgatgaccagtacggtctggacctgaccatccagtttgacaaggatcgtccgggcacggatatgtacgacgtgcagaagggtgagaagtcgccgctgaccgaggaagagcagggctacctgctgtgggatttggatcagatgccggaagcggaagacctcaagagcgctgaggaagaagtcatcaagctgggcttcggcaagaagccggacgctgacgaagacgaagacgacgatgatgacaagcccaagaagggtaagggcaagtcgaagggtaagtcgaagtcggatgacgatgatgacgatgatgacgatgatgacgatgatgacgatgatgacgatgatgacgatgatgacgatgatgacgatgatgacgatgatgacgatgatgacgatgatgacgatgatgacgatg

SEQ ID NO: 6 - DNA, 197087 bp, unidentified
  source 1..197087: mol_type = genomic DNA
tacttgagcgttagtagtaataatcgtagggatcttcatccctgaccacaatgccattgtcgcgcttgtttggatcgaccttcggctttgacagctcggctagaaccgctcgcgcgccttcctcaggcatgtggatgaagctaacgcaatctgagtcgttgggccaccagtgtccagaaccagatgcgaatgcgtattggaaagtcttccaatcgaatttccgaacaccgtaggtgccgtcgcgaaacttgaccagcttcatcgaccgtccttgaatttttcaatgttgattgggaagccaacatcgtactttggctctggattgatcagggcctcaaacttgctgatagccagcggcaaatccatctcgaaaaactctcgattgtcggtcttagcgtaccacgcgctgttgcttgtcttgctcaggaattggtaacccagctgcaagaagctccagcggcggacgccataggtgccgttcttaaatccgacaaccttcatcaccaagactcccgaccagcaaacgcgtctgcgcgttccgagtggtaatcgacagcccagcccaggtcactaatgcgcgccgcttgtgcggtagcatgcgccctcagcttagccaattctgcctgcgcctccaccagaagctcgcgcgggttgtccggcgagcctgcaaggtatgcgttgattcgatcgtctagcgtcatggcagattgagctcgactgcaatctcaaggccatccatggagggtgcatcgtaaccaccgaagccatccatgccaccgccgctcacatgccaataaaaattcttgtggatcagcttgtgcgggttgttctgctcgagatgcgcgcggacgatttcctcgatctgcgggcggctcagtgtgatcttactgtcaaatttcacgacagcctcccatcacgcaaccgcgcgagatactgctcgactgcttgatcagcgatcatcttggcggtgtcatacccaccacctgccttgatgctcgcgatgtacacctgctgccaaaattctttgaggctcatgtcttactccagcgcgaagctgcccttagagggcagcgttcttgcgcacctgatccattgtgatgggattgaaggtcgtcgaattgccatagtggcgatagacgacacgatccatgcgaacccactcgctctcgaactcgagcttttccttgtcgaggtcgatggtcttgtactcgctggtcttggtgctgcgcaccagagccagatcgccttccttcgacttcttgcccttgtcggtgaccgggtccttgacgatgctgaacacctgcccgtcgaacacgccacggcacgccttcatcgcgaacttgaacgtatcgcgatcgaccttctggagcagaccgccacccatgccgaacgcgatgttgcttgcgctgattccgcgctcctcgagaacacgaaggatctgttcgaggtcgcccttgtcaatgccgtcgccctggatgacacgaatgtgatccggcaggaccttgtatcccttcgtgttcacgtagtagcctgcgagctccatgagacgctcaactacttgcaccggcatcaacaccgggtcaccactgtcaggacggagaacaaccgttgcgcctgccttgcgaaccagatcggtcagcgagtggatgtgaccttcctgcggcttggtccagagctcgagagcgcggaacgtgtcgtagctgtcgatcacacaggcgaagattgcgttctgcttcgcgtacttgctgaccatgttgctgtaggcgaggaattctccgttgcgaccccagctcgtcatcgtgctgtgctcggaagccgagatgctgtacccacagacatcgctgtcgtagtactccatcgcatattcgattcctgcgaccgtgtcggtgcccatgaagttgatcaggtgaccgaaggcgccgacgcctgctgctcccggagcagcaccgcggtagccgaaatcgtggagtttgaacggaagctctgcatcgggcgcatcgctcgtcttgtcgaggtagcgcttgatgaccttcttgatctcacggctcttggtcgcgatggtcgaggcgtaccagacatagctgaggcccagcgtctcgaggtagctcgtcacccagggcaggcgcgcgtcggtattctcaagcgacaccatcagctcgttgagcggaacaggcgtgccttcatcgaccgaacggagaacgacgggccacttgccgccgtggtcggcgacgatgatctcgaagccttcgcggttgaagggaaccatgtgcttctggcagaagatttctgcgagggcgatgtggcggcgcgtaatcggcttcatcagaacttcgtggatgaagatctggacacctgcgaccaccacatcggtcacgcccggaattttcgttccacgggcggtaatgtagctcttgatcgactgcgtctcactcggatactgcatgaagtgagaaaacttgtagctgtcagtcgccaggattgggttgaaaatcgtcataagagaactcctctctgttgtcgtgtgattattgtagcaccgttaaatttcaatgccattttgccgcagaaccgccttcgcgttctcgatctgagctgccttctttcgctcggcttcaatcctcaagccgttgaggtagcttcgataatattcgcggatgtattccttgaggacttcctcgtcgtccgtctcaaggaaaatcggctggagcttgagcgagtatgcggaatccccgtcattgtattcgcgctcctgggagtaggtgccttcgtagctgtagtagcgacctgtcggcgctgcatggccttcaagctctgagagcggaccggaattgtaccagcccttcttgaggccctcgaactctggctcggcgatgacacggcgagcgagaatgatctgtcgatcgaagcaaggcttgagtaggttagctagcatcccgttgagctcggcttgtgcgttctcaagtgcctcgatgctcttcgctgtgctggagatgcggacgttaaggtcctgtaggtgattggtatcaacgatcatcggcggtcatagtcctggtagttgtcatcgtcgaagccgtcagcccatgcttcaagatcgcggcgatagtatgcgcggtcctcgtcgttccatgtgcgacgttcggtgtacgaggcccgcgggcgcttcttagagtgttcctcacgcgcatggcgtcgaaagatttcgatttcattgtcagcagttgccatacccattacagcgtccccagagctcgttggatgattcgaccgtggtcggagaaaatttcgcggtagttgatgtctgcaatcggaacccacttggcttccgctgcgtcgtcgcctgccttcaccttcggaagcggcttgttgtcgtccagcttgattacgtgtacgtgggtgacgatgcgcccacgatcttcttcggtcactcgaccggcgcgatcctcgacaaagacggattcaatgcaacggcgaaggacgtctggctggagcttgatgttcgtttcttctgcaagctcacgtagcgcacactgttcgatggtctctcgctggtcgaggaatccaccaggaagagcccaaagtcccttgccaggattctgtcctcgcttgacaagcaagatgtgccccgactggacggtaacacaatcggtggtgacgaaaatcggagcgaacggcagagttgcgtaaggctttcgatagtcttggaggaagcggtactcttcgcgccacccagcatacagatcgggtcgagcgcgctcatgtgccgcaagatagctgagaacgccttcggggaggatgcccttcgcatagtggagatgatccgtgtagatgagctgacggagcttggtcgcgtcgtacttgaggaggagaccgtcctgatcttcgtacccagtgtcgttgaacgtccactgagggaacatcttgaggtagaaactcgactcgtccttgtcgtgaccgaccagaatgatcttgtcgtcatggaaagaattctgggagacgaccttctggacgcgcgcagcccactcggtatccgaggggtggtcgatgaccgattcgaggacgacgttgctatagtcttccttcgacagcgagcggagaatcatctcataacgctcgccgacggtgaagggattcttgagcccgcgaggaccgccggtgtctccgacgatcacgatgaccttacgggcaaggcgcaaaccttcgcgaatggcgtacaggtggcccaggtggaacggctgaaaccgtccgatgaaaactgctacatctacttcggtgtttcggactttcataggaaaactcctttcctgtgcttagaaaaagctgggcaacattatgctgcccagctgtgttgcttttttacttccggagcttgacgccttcgtcaacacctgtctcgaacttctgtgcggtgtcagttgccaccacgatgttgatcttggcgaggtcgatcttcgggtagccagctgccttcagccagaagcccttccagacatagccgaggttggtctgatatgcgcgcttggcatcgaggagctcagtctggctcaccttgaactcgttgcgtccggcttccatcgtctgctggagtcgattgtagagtgccgggtcgagggacggattctgctcctgaatccactgccaggttgccttgctaccaccttcgccgtaccgaccttcgaacgtcgcctggatgacctccttcaggtcgtcgcgctgcatatccggcacctgcgccatctcgccgatcttgatggtgtactggcccaggatgttcttgttgtcttcgtgctttgcgaccagtgcagtctctgcttcgttgccgtagttggcagccgaaacatagctgaccaccacaaacaagccaccgaggatgagaacgcccaggattgccagcgtagccaggagagccgaaccgcgattttgcttcttcatttcaaattgtctcgtagttgagttggattagcggaaccgtgtgaaacgagtataacggttaaaagtttcttcgttgaacagatcgtgtttccagagcaggtaagacgtgatgagcaggagaaccagcacaacaccgatcaaccagccgacttgctttgcagttggaccaccttctgccttgagatattcgtagtccgacatctgcttgcggcggaagtgctgagtcacagcggtggtgatagtttcaacacccttagtagcgtcagatgtagtgccgagggcttgcagattgtcgcgcagctggacagcaagcataccgttaccagaggtcttgccgaaggtgaaagcttctacccagtctaccttcacgccttcggttccgactacgataaccacatcgtttttcttgccgccgagccatgctcgttcgagcatctgtgcatattcgcgtccttgacccttgacgagcaccatggtgatgttgacttgtttctgtgcgcctagctgccggagcttatcatcgagaagggaatcccactggtcgatgttagggactaccgcacctactgctatggtgtgcttaacccggtagtagtcgtagacgctcgggtatgccgggatcaaagctgcctttgtcttcgactcttgctctgcaagcttcatgttgaagagactgttaggcgccgccttcacgtaattggtatagctgacctccgatgctgccggctcgccgatctggacagcgccccaccggggtggcatgtccgaccctcgacggtcaacgcgatcgatcgtcttggtaccaaccgttgtgtagacgtcccaatcccaatcgttggaatgctcgtagcaggtgtcacacgtcgtcgaacaagaacggctcttaccggaccccgagcaggtctgtcggcagttgcatgagtaagaatgcgaacaggagacccagttcttttctttcccggtcacctggccattgatgatctgggtatccgaagtgttcgaccaggccatgatgccgtagataacgcacacagctaagattgctgcggcgccctggaggccagcctccttccaggtaatttcgcgtttgaacaaaaatttcgaagtcaagacccagatgatcgggatcaggcagagccacaatgcgatttccatcaacgaactcctcgtttcagaactgtttcacacatgatatagacggacaatttcgcatcaaccggtgatgaaaactgggttgaatttctggccctgatacttgtgggcgttcttgtcgtggagcgaaattactttcgcgaagtacccgaccatgaactcgttgagcctgcaaccttgctggatcacataggtcaggtacgaaagttcgtcataggtgcagccaaaattgtcttcatcgctgctaccatcaaggaggtcgccagtcggtacgcggtcggtgatcgatgcaggtacgcccagaatatctgcccatgcgatgacctcgaatttgtgcaggtcagagatcggctgcacatcgaccatcatatccgaattcttgccgaaccatcctgcgtaccccatctcatcgaggttagtcgtaccgaaggtgatcgcaccgaagtgctgcgcgtatgcgaagagcgcttgatagcgcatcgcataggtcacgttggcttcgacgctctggcgcgtgttgtgcaggcggatctctgccatgaaggtatagtaggcgcgcgtcaggtcatgcgagtgccattcaatgttcttgcgatccttgaacgccttcatgaggtccgaaacgtaatcgaaattgaacactcgatcataggtcgagtaatcgatcgtgactgcgtgaaccttgatgtcaggaattgacgacaacattgcgaggacgagcgccgagtcaaccccgcccgagacgcccactacgacttgcttaatatcccaacgacggaggtagttctgaatctccctgatccgctgctgcgggtcgcggcagttgcgcaggtgcttgaacattcggacgtgctgacgaagctcttctttcttcgtgggcagctggatgtgcgtgttaggcctgcggttcatgcgctacgcaccttggtgaagatgaggtcgccgcgcatgatgaagcgctggctgcccttgtcagtgaacggaagaacagtgtgacagacgttgtgcgggaagaggacgaccttgcccgcctgcggcttgatcttgaggaagatctcatggtcatgcgcttggcgcgaccagtcgctcttgtccttgccgtcatggtcgatgaaagcgatctcgccagtctcgcagtcgttgaaatacatcacgagcgagtacttggtggagtagaggttgcgtccatcgctatccataacatcaaagtcgctgtcatagtgcgggaaatgctcgccgccttcgtcgtagcgcatgaaccggaaatacttggacacctgctggaattcccacagcccgttgtcgtctttgtagagctccggtacctcagcggtgagcacgacgttggtcagtgccttagcgaaagcgccttcccacgcgcacaagcgatgggagccgatctttggctcttcgagcttgcttgcaaacagaccagtcctcgggatcgcgtagtcttgcggaggacggaaaccggtgacgtcaaccggatacaagtgacctgctgcctcgtatgttgtaaacagaccctcgacctgcgccatgaggtcggcagtagtgttgatctcgataacgccgcgcttgtggatacgaatatcgttgaccactgcacagttgagtgcatcctccatatcaagaccgacgaggtaagtgacgttcgggctaatgatctcaggcaacacgattgagctccgcgcggaaggcagtgaagtgccggtggaagttgaagtcgaatgcttgcatgctgcatcgcgagctgatatcgacataggggtagcagaaatcgcgcttgcggaagtcgtcgatgtcgaggagctccgtcgtcgctgtgtcgatgtcattgtagatggcgtcaaacttcgcacccttgctctcgacgaacttgcgggtcgcgccgctgtagacgtccgagtcgaggatgaccatatccttcgtgatacgaccatcgtccttgtcgaacgtcgcatcttccagcggattcttgaaggtcctgctcagcttgatgtagggcaagaaggacgcgtattccttgcaaatcgtatgcgtgaacggaacagcgcgagcacgcgcgcgagacatcgcagatgcgatctcgagaccgatcaggagcggctggatggaaaggtactggtcgttgaagtactgacggaacagcttcacttcctcgaggttgttcactcggaggaacagatgtttcttgcggcgctgaggattgcccatcgccgaagtgctggcacccgttgtgtcgtcgaagtgttcgaccttgatgaggctgtggacgtcgttaagaccgagccagtctgctcgatccttaccagccaagatgattggcgtggtctccatctggttcaggacgagcccatgggcgagcaagaactgctcaagcaggtcagtgaaattgtgatcacaccgatggttgagcatcggatcaatatcgatgatcgctttcgggagcgccttcttgatggcatcataccgatctttattcgctgcgcgcttcgaccatgcgccgtacttctgcacggtgtagtcggaattcgcaggagcgatcacgagtaccgccttcgggtacttcttcatcgccgcctttgcaaccgagacgtgaccttcgtggaaggtgccgaacgaacccgggaaatagatgatctgcgtgcgatggttgagcttgggcagcaagccgtagaaggcatcctcgtccagaagacggagcttctctttcggctcaaaatagccacattgttctgcgacgcccctttcgaggtcgcgatagattactgcatccatgactaactcctagtctatggtggaatgatttttagggccgcctctcaaacgtccgtgagatgcgagcaccgttgttgcactcgacgttgtactcggtgcggtaaagtgctaccgagccgccacgaccgaagtagttgttgctggcgcgaatggtaccccgcttgaagccgccgtttgcttcacaaagggcaaccatcgttgcttctccgcctggaaacatttccgcttcgtagacgtaggtcccacacccggtcagggctagggcgatcagtgctgaggtcagtagcgtcttcatgccattagattaacggcagaaaatttctggtcaatcttttcaagcgagtttcgttcgcttcactggccaagccttttccttaccgtcgtggtcgaaaattacgtggtcgaggtactgaccattgatggtgtgactgacgccctgggtgcggcggttttcaatgcgcttgacagtgacggtgtagcccattgcctttacaaccgaaccgacgccgatgaccggcttagcagcagccttctcagccgccgacttgacctcgaccttcttcgtttccttgccgtggaactgtacgatcatgtcttggaggaacttcacgagcgccttaccagaagcgagacgctggcgctcattcgcgatagcattgtagcgtgctaccgtctgcgagcgttcgtcagccttgtcccagtcaacatactctggctcgcgcttgcccgtagccatgtttagcttgccgcgtccaatcgcgacttgcagcgggcggagcttgcccgactcgaggtcacggatgcgcttctcaatgacaggaacttccttagtgatgtctgcgatgaccttctcggagacagacttgtcaacctggagcggaagatgctgctgacccggacatgcgccttggaaccaaccatccttaattgtgtagccgtgatgggtgatgttgcccttagtgcgaatggcttgctcgcgaccacagatttgacagatgccgcgctgctgttcagtcgccatctctgtgatgtactgctcgaaggttggtagttgcatgtctcatgcctaagaattgttgtctgtatttaacgcacgaaagggcgccgaagcgccctaatgagcggatgaaggtcaagccttaggcttgatgcgagcgatgctaacctcgtcggcgctgccagacttgagcagctcgttcgccttgttgagcgcctcgatgaggccagtgcacacttctccgttgactgtccacttcggagtcttagtgtactgcctcttgggtttctgagcagccttgcgtggcattagatgcgatcctccaggtagcgaatgtcgaggccagccttccggagacactggcgctcctgtgcgttgataaattcgcgacgccctgcgagcgctcggttgctaacagaggacagcatcatcgtgcccgggacctccatgaagaatgcgtccgacaggtcctgcataccgggccagctgtcttcgcccttgcgcttacgacagaggtcgaggtaattcttctcgccatggatgaaggacaagatggtcgcagccacgatggtgtgcataccgggaccgactgccattacgccccacgggcggaagtagagccagtcgaagtcttgaagccggacagaatggagagggcgcggatcacctgcctccttgtcgatgaggatgttccgctgcccctcggtgggcttgtcgccgatgtgttcgttcacaggtaacctcggtaaagttcttccatctcgatgccagtgacgcggaagtagacgccgcgcttcttcatgtgctggaaccagaagctgttctggatctcctcgatcacatgccggagggcgccagccttggtcttgttggtgttggatacggaaaaatactgaaacccatccttcaccggaatctcgagcgtcgcgtccgcatggaaggtgtgctgcttccaggacttaacggagaagtggaggttgaggatcagtttcgcatcctcgggctctggccacttctttctctgcttcctcacgcgcttaagcgcgtattcgatttgtttgcccttgtccgcgccagtgggcatcttcttcgcgcggatggaggtgtaggtcttttctcgggggtcgagcggttcctgcggggcctcgaccttgtgcttcttcggaaatgccctcatcttgttggctccctgaaacttctccaaattttatagaactttcaggtcacgaacaacctataggaaaatcaagaagttacgtgagtcagcaaaggaaagacccctattttctaggggtcttggtgttgctttccgttagtgcctcgaggagcatggtcgcccagcattgcatcgaatgaatgtcgtgccagcccaattggagctcgcgcggcaacctttctcgatagccttgtgggtgttccatcttgaacacagcttcgaggtttgctttgaactcatctcgcttggagaggaagtgctttgcgtgctcgattgttgcgtctgtgtactcgcgacctttcaggatcttcttggcgcgtttcagaacgtcatctcgacgtgctactgccatgccataggctggaccgaagtcacagccttcatagtcatactctactacatcgaccaactcggcaattaggtcgagcagatcagttgcattcgctagcgtttgcctacccattctgctctcccctactggcggttactcgtcgacgccaaagatcttctcgtaggaggtctcgaggacttccttctcctgaagctcagtctggaacgtctgacggtgatagattcgcgcgagcgagcggacgagcttcttcggaacgtcgtgttcctcagccacagcagcaatagccgccttgatcgtggccttgtagccctcagccatggtcatctggtcgctaatgtcttgcagcgacttgcgaaccttctcggcaaccttcgggtcgttcaattggggaaattcaacagcatcggtcacaggtatcaccttctagtttaagaaatcgtttgatcttttgccacagggttagactgttctcaacagggcaattgaatgtctcacaaagctctgccttgaacgcgtccacattttcacacacttctacttcaaagactacaacaccatgctcttcgtcaggctgttccgtccagtgcccattgtattggacgacaagtgcgtacagctctgcgaatcgatttaggttcacacttcctctaaagcgcacgtcgtgcctccctctcttctttgtctagttgaatcgctcgcacgagccagaggagagcttgatgagtacgacggttctgaccaccacccatatcggttcgacagcgaattgtgggcattgggttcgcccattcgtcatcaatgtgctcaaggttccacatcagcaggtgaacgtcgccatctggagcgacccacgccttgagccagttctgtccgttaccacctttgtcgtcgcaatctagctggacgaaatcgtccatcttaagtccgtcgggccatcgaggctcaaacggcggctcgctattgattacttcaaccagagcttgactgggtgcagtaacatagaaaggatgccgatagccgctcggactatcccagctaggaacgcttgcgccttcacgaatgtgccaccctttctcttctgcgatctttcttagtcgtttctcatccacgctttctccttcgggcgacagcacgaagctttcgcgcctgagcatgcttcgaccgaggttcagtaatccggtctacccattgctccatttggttgatgtacttgaaaatcatcgatgttcctccgcccacttccaggtcctcagcaggatgtcttgcagctcttcgcgattggagaagcccatgaagaatcggtcactaccgtcttcccattcctcgagctccgggtcgaaaaccatcctgctgcgacgctctgccaaagcatacagttgctccaggcaatcgtcttgggcgttctggtactgttccagatcaaagtgaagggtgtctgcgatgccgatcttgtcgtcatcgaggcggaaccacgagactcgaccttccttgctgacaacgtggaagccttcatgccagccagcgcatccagggatatcgcaggagcaggtgaagaaatactggttgcagtattctcgcttgatcggaatcacaaattcgattggatcgaaaaggtagtcgatcagcttgccgtcgatttgcagcgtcacgtagtcatcgacgaagaggacttcgatcttgttcatcagttgcgccccccatccgaggacgatcatcacttcctcttcccaagcagtgtttgcgaggaggtgccctagctcgcgcgcacgatatccttccgcatggtatttctccatgatgggacggaccgccgcggcgaactcggcggagatagcgattgccttttcagaccagcgctcgtcgtctcccacgtacaggctggggcgaactactgctgctcgggctgctcgctcttcacttcggtttgccatgacaaaatctctgcaaggtaggactcaaggaagagccgaatgttctcagcgccgatcgggttctgagagtgtacgtagaactggaagtcctcaaggtcttccggcggatcgtcgatcatctgagcgatgagaaactccgcgcacgtcttgccggtccagcgcatatcgccgaggtcgtgatcgaacgaaatgtacttcggaattccgcgctcaacaaggacgcgcttaaactcccagaagtctcgaacgatcacagcatcgctcatcgccgagcagggttgccgctcgtcgtcgaggaagatctcgtagtcactcagcctgctcattacgatccccaccgcagcatcgaccattgtcgagctcgcgtcttgttggagtgcgaccacaatagcggcactcgtaaccttccatcagctcgtcgggcgaccagccgttctgctcgtagctgtcatcatccagcatggtagacagactcgttgtagagagcatcggaaagttcgttgagctccttcagagtgatcttgtcactcatctggtgccgcccgatagcattcatgcacatcgggaaacgtcccttgatacggcgctcggcggactgcactgcctgatagacggtgtacttcttgaccgtccgctcgcttaccgtgtagatgtcgtcgttcacttactgatcctcgtttggatgaccaaagtctataccgaaagtttttctatcaaaccttatgtggcgaacggcagaggatccagtgaagcatgtagctgctgcaacgctgcgggtagtagatctttttcgccggagtagtaagctgtcggcacaactacacccagcgcagtggcagagttcctcagcgcaccctcacgaaatagcgcgaaaggaagatgcatctcccgcgcaggcttagccagagcagcgtagagctcttcgatactttcatcgccaccaaaggagcggagaagcatgatggtcttgtgcttggtggcccactcgcggaggttctccctgtactcagggttccacttcgggtccagaaatttctcgtacagctcagggatcacatgaccggcttggatgccagcttggattccgatgctgtacctattggcgactaagtagagtctcataccaaccattcacctttgttagctgctcgcggagaatttcgttctccgctttgagctttgcattgtcttccttgagcttagtcaccacctggatgatttcgatcaagtcctgcgtcatttgagcataggaatacatcaactctcatcccacggtgcagcttggtcgttgaaaatttcaaccatgcggtatgcgtccatcgctgcgtcgtgcaacgcatcgtgcttgaggaagttgcgagggaagccgccgcgcggctcatactgaccgttctcaacacctgtcaagatgtcgatgtaggtgcgggtgtctcggatcttccaggtgttgaatccacacttgacacctgtctggtggtacatgtgctcgatcttcgggaagtcgaaatacgtgccgcgtgaccacacaaacgagttcttccactcgtagcctgagcccttgatccaatcgttgaacatgagcagaccgctctccatgtcaacgtcttcctcggacggcttgaggatcttctgtgcagctgcttcctgctgcttccaccaatcaatggtgctctgatctgtcgtgcgcttccagttgacgatctgatccttgatcgagaactttacgtggaaaccgctcgtgatgtacttgtcgtagttgtttggtccgttcgggataagctgaaaggcagcgcagccgatagacaggacaacggtgttctctcgcagaccgagcgtttccgtgtcgattgaaagatgataaggatgcgtcatagcgggtctctttaaatttcccatatgataaagcctggaccatttctgatccaggcttctgtagaacaagattaagacttgacgcggcttaggaactcttccaactcttctggcttcgtcatctgccactctgtcgtattcggaacagtgacagtgatcgattccatcgtgtctgggtgctcgacggtgaccagaacaccaccatcgccgaacggttccgcatacacatttttcgcagccttgtagccttcgatatctgctacgtctgttccgttagtcggaattgctccgctcatgaaccagaactgcgatgtagtgttgcctgtctttgcttcgaacaggaagtcattgaaatttagcatgatattttccttgagaacttcgccgtactgtgctgcgattgccttcacctcagcgaatggaacaatctcaacgtagtaggcgcggtagatgcgtagctggttttctggctggtacaccgcccactctggagagcggatgttgtcgccgccgaggcctgctgccttgtagtgctgaccttggatacctagctctgcttccatctcgaacacgtatccacgaacgcctgcagtacgggtgataccgccgcccttgtcacctacgtactgcatcgccttgttggagatgttcgagaagtagatgccgttaccgagcatgcgtcctgctgtggactggtcattctgtggaatgatctggaagccgttacgcagaatcatcgaagctgcgacggtacctgtgccgtggaacactggcttgagggtgccgtccttcggatactgcttacggaatgcttccatgcgagccatgttgcccgggaactcgacgtcgaagatcttgaggaccttgatcgccttgtcgccgtgcttgttgttgcgatacttgttgacatagatcgttgcgcggtcgatgtcctgatccgtgaccttcggttcgctgatcttcaggtcgccgaccttaccgacgctcatcttgacagcatccgagatgtcttcgatcttctggacgatgttgcggttagcggtgatcttgatcgggatgttgttgtacttgaggatctgcttgattcgatcgtgcgtcaacgggaagtctggcttaatcggatgcttgtagaggtcgtccttaatgaactcgacgtactccacctcaccctgctgcttaacgatcaggttacgcgtggtgcgcggggcttcctggaacatgcggttagcgaggcgcttgtccgtctcgtacacatcgaggagcaggtcagcgaaagtcttgttgacgaaatcgcgctggtccttgtccttgatggtgtggacgccaacgacttccatcgcaggagcgaacagcttgaggagttcacccttggtcttatcgttgaccttcggaccaacctcagcaaggaagcgaagcgcggcgccatgcgaagactgaaggtccatcttgatcgcctgggtaccatagtgcttaagcgccttagctgcgagatcagacagctcgtcagtgtcgatgaggttgcggaggtcgctgacgccgtgaatagaagtaccagccttctcacgaacgagcttgagccaaccatcgtacatctcagggttaagcatcttcacaaactcaacaaagtgcgtaccttggctgttcatccatgctgcttctgccttcttagaagtctcaacggcatctgcatagttaggcgcagacttgtcaacgaaccagcaagtcgagatgaacgaacggttccatgcagccgagaagtattcgtgacctgcggcgaagagctctgggcgcttcttgcggaggtgagtaatgactgcgcgtgcgccgaccgagttcttgccctcattgaagagaccgatagcgtagccgtagagctccttgtccgcgacgatgtcaacaatatcgcctgagaacacatagccagtcagtcgagcgatggctgagccatacataccgcgctttttcatcccgtcaagcgcagcctgacgtagagcaagattgttctcttcgaacacatacttgatcaaacggtcaaacgacttctcgtagccaaagccatacttggcatagctgagaagctcctgaatgttggccttctcgatcaggtactcgaggtaaggcgtatttgccttgaagtctggcgagctgtaagacgtataggtcatctcaggccagtcgatcttcgcatttgcgaagcggtcgaatagccagtgatacttggtccagtctggttggctacccgagtggatgtgcgtgatcagcgacgtgatacggcaagcgttgtggaaggtgtacaagctagacatgtctagctccggtgcagccttcagagcttcgagcgcaagtgttgcttcgttgcggatagcggtcgagtagaagtccgtattgctagcaagcaggcgcttgaagcgaagtgacattgcatccgcagcattgaacttcttgacgtctagcttgatcagaccttccttagcgattgccttgaacagagcctgcaggccagctgggacgttgccccatgttgtttcgtcaatgctgacctcgttgctgttctcgatgacaatggtcacgccctgcttgctgagaaggtcctgcaccgtccactgctcattgatagacttaccgctgtggaagctatccatgaagccagataggtggtaaccgaccttttcatcccatgcgccagaatgcatccagttctgaagagcgccacggaccatagcgaagcgaccctcgtagaacttcttgaagttgcgtgcgaggaatgcgttgcgcgaatcggcggtgttgcctgcgagcttgcggatgccttcatcgacaacatggcgatagattgcacggtaacctgcattctgaatgttgttagccgaagcgttgttgaccagcacattcagagcaccagcctcgtctcctgcgtttgcagcgtcaacaaatgtcttgacgatcgggtagtacttgaagttggagtcgatcgagttaaggagttttgtgaactccgattccatgaacgagttccatacctcagtatccttcgcagtaagtagcgcaggcacgctaaactcctgaaggcacttacccagcgcgcggaggcggtcgagatttctgtcaaacacgttgaggagcggcattggttccttcggcagattgtacttcgcgagcagagcttcatactctgtctttgtgcgcgcaaagtagagatccttgaccgagtcatggttgatgactgggtccttagtcacctggatgaccactgctggcttcggtgcaggcggagctgcaaccgcaggagcattctgggcctgggtgaccacagccgagttggacttctggcggtccttgtcgttgagcaccttgagcacggcagacattgcggacggatccttacgaccaatccacttcacgaacgggtgctgctcccacggaatgtggtagtcgtgcgagatgacgaactcagggctcatcactgctttcttgaagcgagcgacatcaaagtgacccatgaagccgaaacgctcgaggtaagcgtgaattccgcccttaagacggaagacatggagcagcgcgctcatgtacgaagcgtcgtcaccgtgcgccgcgccctgaggtggtagcgtgcccttagcagctcgttgacctggcagggaggctggcataaccggagcagcggcgggcgctggctttaccgtcttggtggttgtagccgccgccgaaggggcagccacaggcgtaccgtcgtgcttgatcaggtcattgacatacgcgccgagcagaatgacgttcgcgagttcctccgcgtagcccttgtactcaggcagcttggaagtcttccagaggcgataggtcgcttcttcgagcgtatccttaccttcgatgaagctatcgacaatctggtagacgcgaatggtcggcttgttgctgacaatgcggcaggccttaaggatgtcgcggagcggaccgtccttgatatcagcagatttgatcttgccactctttacaagcgcaaggaacttcgtcgccatgtttgctgcgacgttgttgatgacacctgcatcatgcgcgatctttacgcagagcgcccagtccttgttagtgtcagtcatctgacccagctggagcttacccagacccttgatgtaggtgtcgagcgcaggagtatctttcaacttcaagaggccagcaaaggctacgaagttcaagtagaaaatggtcgcagccttcgccttgtcagcgagtagcgtggccaattcggattggttagtgtaaaagctattctctagtagcataattctcatcggccaaaaataaaggacaggggtgagctgtcctttatttaccaacttagttaacgacccttagtcgtcgaagccctcgaggagcttcgcgtacttcgccaagtcgtcagcgtcgtcaccttctggctcagctgccttacgggtagctggagctggcttggactgcttcggctccacgaactcgcgctcaacctcagtcgcctgagatgcagcagagttgcgtgctggagctgcgccctgaacagcctgcagacgggtcttgagctggtcatagctcttgaacttgtccggaccgacctcagcctggaggctgtactgcttgcgccacagcttctcgagtgcttcgtcgtcgccaccgaacagaggtgtcgcctcgccaaacttgcacttgtcgtacgagcgctgcttgttagcaccgttgtacgccttgaggtggaagtcagcaccttcccagaagtcgaacgggttcatcggcttctcgtcttcgaacttcggctcgagagccgcttcgatcatctcaaagatcttcgaaccgtaggagaacaggaagaccttgccttcgttctgtgggttcttggagtccttgatgacaaggatgttcgagatgtacttgaggtttcgcttctgcttgcgagcgagttccttgtttgcctcgatgcccgaattccagagctcggagttgatctccatgaccggatcggcttcaccgatggtagaacggcagttctcgatgtaccacttaccagtcttctcgttcttgaaggcgtggttgtacatcttgacaaacggatactcttcgacttcgtccgtgctgccaggtactggcggagctgggaggaatcggatcacggcgtaaccattaccagcatcatcaacggtgagcttccagtaacgatcatcgggaccgttttgaccgccaccctgcttcgagtcagcaagcttcttgctgaggtctgcgaagttaccacgctgcttcttaagtgctgcaaatgacattttgtcttctcctattgcttattgaatgaggtcttatcggactcttatggtctactttgcctctactagcctgttgagttgctgtttcaggaattcaccttccacctcaagccaacttgcgtatttagtgagcatgaatctacgttcttcccacaatggatcaatcgactcttgcgagcagaacttgaaccctttctcgatgagggccagtgtctcatcggtcacgccaccaatgatgtctgattgatgagtcacaatgtacggactctgaccatcagacaacagcagtttacgaacatcgatctgtctctcatccatgaagaggatgatgcgctcgatgtccattcgaacaacgtacttcaaagagttgatgatcgccattcgcttcttgtggaacgcgacactctcctcttctaggatctcaccgatccatgcttcacgcttgcgcttgaacagggacacgagcatctgaatgatggtctcgcgatcatgctgctctgcaagctggatgaagcaataggcgtccttgcgcttcaatagctgatcttcaccgaggcgcagttgcatgcctcggttccaattcaggtcaccgttgaagtgaagcttgaggcctacgtaatcttggaacgttctaagcggcttgcttagaaaagagtcttggctggcttctgcacgcatcgacggacttttctttctctgacagcgtcctctttcaggcgctggatgatgattggatcgagcgtttcgatgaactcgtcttgctcgagatcgtgctcttcacagtagtccgatgctgcttcgaacagaccagtcttgttctgctccgcgatccgcattagttcttctaggatcttttcactgtagctcatttcttcaaaccttgataaacttccatcaccttctggaatgcagcgatcactgcaagctcttcctcagtagccggacggaccttctcatcccacgagtgcgaagtgtggtaggtcacttcccagtttccgttccaaatctcagcaccatactgaggtgcttgctgcttcatccaacagccacggatctcggtcagcacatccatcggattgatctctacctcgactgactctgtcttgtagcctttcactttcattgcgctaggtttccataatatgtcttgacacgtttgaggacctcaggcacccaaggcttgatatctcgtactacaatctgagggaatggtgagtcgcgtcgagcaatgaacagagccatttgcttgatgcgaatatccaacatctcgaacagcatcattgagtaagcggtacactgaaggtagtagtcctcgaggtactgctcgggtttttccttcttcgagttcttgcagtcgatgagggtgagcgtgccattgtagagaccgaggcagtccaggtagcccatcatcttcatgtggtcagaccagactttcatctggacgccaattggctcgaccttcgcgatgtagggcttcaactgacggaacaagcggaagcccggctcgtccttgtaaagcatttcgtcgaacgactcttcggtcagcgaattgttgaacatggtgtccaacgaagtaccgatagcttgcgactcgcggatgatgcgatcagcctcctcgttgcccacacgggcgcgccaagcgtcgaggccagtcatgtctttcgtgccgctgaggaccttggtgacacctgggtacttggcaagcggcttgacgccactagccttgaagtcttcgaccttttgacgaaggaggattagatcactcatctcttaaacattccatctgcaatggtactcaagctaaggaactcaatcggcttctgtgcaacgtagtcaatgtgcgtatgctcttcaggaatgtcaaccagtgcagtttccatcgcctgttggatctcttccaccagagactgctcgagctcgtcgaaggattcgcttgcaaagtcagggagcatattgcctcggtagtaggctttcaaagaatgctcgttgccaaactcactgacgaggtctgctaagagcggtacatacgggctatagtacagagtacccatgagtcacataatgattgcttgatacaggatcagcgatccttaattgcggatcctggatgggccttcttgatcgcgcccaggaaattgcggaagtcaccgggtgccttgtgacgaccaagtgattccggcgtcatgaattcactatggtttgcggtgaaggtcttcttagacactccaccgcaagccttacaagtacgctcggttgcgggatcttccattgtcgcaatggacatcatttcggtttgaacgtgttcgcactcgcgacacttgaagtcgtacatcggcatcttagaacccaccctctttcaggatcttcgacagtcggttagctgtcaggtaagtgaacatcttgcctgtgttcggcttcgcctcttcataggcttcaacaattttagcctggagatcagccggaatcatccgaagatcgatcaggttcctattgcgcgcaaacttgtcgagcatcgaagcatcgagacagaagtactctggaccattgatgccgtactttgaccatgctgcaatcttgtccttacgaagcggcttctgtcgcttgtctggattcatgatcgcatcgtcatcactcaggatgttcggtacgccgtcacctgtatcgccggtgcagatgtgctcgaagagatcatactcagcgttcttcggagtgaggaacttcttgtgccaaggcgaccattgcttcacacgcgggcacaggtgctgctgaatctggatcatgtcgttatccgacgttgccaggcagacgtccatgtgtggaccatagcgagcagaaagaactgccatgatgtcgtcagcctcagcgccatgcacctcgatacacttcacagggaagtattcgcggagctcttgcttgaactgatcgtacatcgggaagaacgcattccagtcgaaggtcgacttgtcgcggtcgcccttgcgcttacccttgtagagcggaaagatgtctttgcgccagtaatggcgggagtcgaaggcgaggacaatctctcccgagtggtccttgagcttcgtcttgagttgcttcatcttgtcgatgcaaagattgcggacgacgtgcatgtccacttgttctttggtcttctgatggaagtctagaacctggctaaagaccagattcgacatatcaataatcaacataccaggcattttcattccaatttttggttacgacggaaacgctgctcgcgtggtgcgagatcaacatcgtcccaatcgtcttcatccatctcatagggtcgccggaggagagattccgctctcctctcggcgcgcctgtctttgccagaaacgaagtggtcagtgtgaagaccgtcacgacgattctttgaactgctcatatctgcttacttccggttagccttccgctttgcgattcgcgccttgccacgctgggcgcgggcgatgctgtgcttaccacgcttctgcatctgtcgcaagtagtcctggaggagcgactgtgcgtacagctgggaagctgcgatggttttctcggagaacatgtctcccgacaaattaagctcagcggtttggctgttcggtgttgctgcttgcatgatcaatttctcagttggtttacttagggttgtttactgctgcgtcctcttcgacagcgatgatccagtctcttacaagaccgcttcgaacgatgtcgtcgaccgtgaattcgtgtagggcgaagcggtgattgcaacgcttggctacgcgaacaaacttgtggaagccgctcttgtgctgagcaaggtcgctctggcgagtgtcaccgcacagaatgatcttggacgagccgccgagacgggttaccagtgtatcaagctcctcgaaactgccgttctggaactcatctacaatgatacatgttccgtcgtatgtcatgcccctttcaaaggaagtggatccaaaacttacgatgtgggcgttcttcaagcaatcgtaggcgtcatcgcgacggagtagcttgttgaagatggtgcgaattgccttctcgtaaacctcgagcttctgtgcttctgtacctggcaggaagccgatatcgcggctgctcacagcggagcggacgatatggatgtgattgatttcctttcgaagataggccatcagggcataagcgatcgcgatgtatgtcttgcctgtacctgcgtatccgaagaggacgaggttcttaccatcttcgaaatccatctgagcctcagcctgaatctggcggattggctcgaaacggaagttatcgaacagtgggttggcagatggcgacttcttggtctgacggtgattcttggccattactttctcttgagtggaggtcggaacttcgatagttcgagcttagcacgtagcccgtcgaaggtcctcttctcaagatacttctggatgtctggtattgatccatgttgtacctgggcgttgatgtctttagcagcgaactgcgcgtcgaacatgatgaccttatagccttgattgaccgctttgaggaattgcccatacacctcggcgttggtttgatagtctttgtcgaagatcaggaccaggtcagctttagcatgttctcgtaggtatttaatttccgacataatagaagcacctgcaaccgagatacagttctcgacaaacatagcgtcaaatggaccttctgtcacatagacgcgcttgttccagtcgactctatccaggccccagatcttcttgcccgctgggtcaatctgtagcgtgagatatctgaccgatacatcgccgaagaatcgcgcctgcatgaatacgagtttcttgttctcatcaaagaacggaatcaagatagcgtcgttgctcggcatcggacggtctttgtactcctcaagctggttcgtcacctcccgaatgttctcacagtagtagaggtcaccccagaatttctctgggatgagtcgtcctttgatatactcacgcgcgtggtggccgtcctctagattcgagattctcgaaaatctgtcaagtagagaccggtcagcaaacgcaggcttctttgtgataaacttctcaaacggatcaacctcaatagccttgacacccttgaatttttcaaaggtgtactccttagcaagctgaggtgcgacctctttcaagaacgagtacaagcccatcgaagcgccacagttatggcacttgaaattcgcactcccatcgatctgatagaagtagccgcgagttttcgttcctgacttcttagagtcgccgcaaaacgggcagcggaaccgcgacaagctatttccgacctctttccagccaggtaaataacttgacacgagccttgtgtatttcaaatcgaggtaattcatgcttcgattttagtgcctcggcatgttcaggactattcaaaggtgaaacaagatggtagatagaacgaaagaaatgcttaagggcgctgtggccactaacaagggctgggtgaatccaacaacaggcgaactgctggtctcgattcgtggcctcccgaacgccattcaatgggacaagggtccaatcgctgcaaaggtcgaagaggttccggctgctaaggcagaaactccagtggcaccaaaggctgtcgacgctccaaaggcaaccaagaagactgcaacgaagaagtcccctaagaccgcggaataatttccaatgagtgacgtgaaagatttggcgagagaaatcgccttagatggttatggtactggcggtgtatttcacgccaagacatttgacagagacttcgctgtcttcatgaccacgcgcaagatgattgaccgcttcctgaaaacgggagcgatcaatgagaagctgctgatcaacaacattgttgtcgttctcaacgtcttcggcactaagaaggtctccgcaatcttcagagtgctgctcaacgacgtgcagtttagcgttgcgaaagccatccttatgttccttcatcaatacgactggaacgtgggtgccgacgtttggcctaaccgcatcgttgttgacatcctcaaagacgtcactcaaaggtacaacctgggacacctctaatatggcattctcactagcactgaacatgcaaactctcgctatcgcttgcggtctcgcagcggttctagcggcaggtagtgcatggtacattcaaagtcttcgcattgacaatctagaactcacctacaaggctgagagggcagagatgcaagcgaaggtgaataaggcagaaggagatgtggcgacgctacgtctgtccttcgaaaccaaccttggaaagaagaaagatgaactcgacaaagactacgcgactcgcgttgctggtatcaacactactgttagcaagcttgctggcatcaggctgcgcgacccagcagcaggtagtaattccggatccaccggtaatcaaggaaacgcccaaggcaatctcggacccgttaccggagagctttctgtcgagactagcaactttctttggagtctcgcaggagatgcagacgttgttagagaaagactctcagtctgcaaagcctggaacgccaccttgaccgaacagtcacagaagtactacgacgagatccaagccctcaagaaagagcttggacgttaagtcgttctgatcaatgtgttgacgttggctctcactggagagtcagggttacgaacgatcacaggagtatttgaagccacggacctagcgttcgtggcttttccttgagcagctggggcgcggcgggctggagcctggacaacgacaggtgcctgtcgagtctgtgcgcgtgcaactgctgtgtcacgcaccatgccagttggtgactgaccaacggctgctagtgcgcgctggctttcatctgcaaagcggcgctgaacacttgcgcggacggcggcagtactacgtccgaagcgtccgccgcgctcgcggtagacagcttggataagctcttgctcggacatgccttcgcggtacaccttgttgaagatgttaccgccagtcttgccgccatgctgaacggtcgtgctccacatgacgtcttgtagggccttgctctttccaaggagcgctcgcaggctgtcgctcttaactgccttcatgcctgggtcgtaatgggttgccttgatgaagtcgtgttcggagtttccgagcgtaccatccgcagccatacgcttccattcctgagcgaaggcgccattcttaccagcgtcagctggaccagcagcggcgaggcgtgcatgagcagcagggttgtgcttcttaaggtatcgcatgaaatcgttcatggtacccgtctttgcggcaatctgatacttaccgtagcttgtgccgccggtggagtcccaacctaccgccgcggagcccttcttaccagattcatagtgcgcagatagagagcccaggccatcgtgaccagcaattggaccactgtgcatagacatgcctgaggtgtcaccaatgcccgctgtgcgaggaccaattctcgatcctcccgtcggagcatgacctacgccatactgctgacggattggaaccgtaccaggcatctcaggaccacgatgcgttggcgaatgtggcgaaaccatcttctgctgagatcgactgagaacagacagaccatctgacgcagggcgcgtgtagatacccttcgtctcatctgtcatctcgtcaagcatcttcgagaggatagtgcggatcgatgccattgttaggtccgcaggtggacgacggacggcggcgccggcaaccggagcagatgcagctgcggcagcaacaggtgcggctttaacgggcgcaggagcattagtagcattagtagcattctcgcgcgcggcgtcgcgtacagcaagtccggcatcaatgccaacagacgcagcagtaccaatgcctggaattgtactcgcaagaccagatgcagcctcaaggccagcgcccgtccagtcacctgccatcgcgcgatttgcagcgaagccgagaccggcaatgccgccgatgataggaattttcttcaacagtgacttaccggctgtcttggcaatgccgcgaccaatcgaaccgcttgctctagtagcgattccgcttgcctttgcacctacgctgcgagccgcgtctgcgccgcgtgcaaggatgcccttagcaggtgcagccgcagcataacgcttcgacgcttccgcagccgaaatgaatttaccactctttggatcttgatagactgtgcgccctgcagcgtttacaaaggacttaacgtccggagcagcacgagctgctgccggtccagcaccaatgcccaccttagcgagcatgctacgtcctgcgcctagaactcttgcaccaatcttcgatgatgctagtgctgctccgcctcgcgcaaggagcttcccgaggaagccagcacccttgccggcaccaccaagtagagtaggtagcaggccacccagagcacccattagaccaccgagtaggcccttaccgtccgacttcggcgcttcatctttcttcaccaactgctcaacggcatcgcggacgcgtactgtgtccttagcgatgaccttgagtaggcttacctcttcgtcctgcgacgcagtagcagccttgttggccttctcattgtgctctttagtcttctcagcagtttccttcgccttctcgcgagtcttttccgcagacgacttagccaccttctccttctcaggagcctttggcttgaccttagcgaggtagctcgcggtgctatgaagcgcaggaatctttgatgcgcctgttgccttagcaagtccactgacaatgctgcttcctgcaaccttgttcagtcgtgaggcaacgacgagtcgatcagacccggtcttgacagctgccgctgctctcaaaattgctggtagtgccatctattaacctgctcgttgcatcttattcttttcggtttgaactgcaatcatagaggtcatttcgatttcgaagatgggcatctcatcaagttcgtcgatgcgatacccatgttctgttactagtaggtgcctcagttcaagcatgtctactagcttgttggtcgggtagattacaggaaaaaatcttcgagcccttgaagctcgaaaccatccttcctgccacacttagggcaagtcacgtccacgtttagcgcgaggacaggaacgttatcgaagaactcgctaatctcagcaagcacgttggagtcaagctcgttgagccattcggtcatctcatcgagatcgaagtcgacgcctgggaccttcatgtcttcgccgtcaacgatgcactcgatgcctgcgtagatgtattggtccgagatgccaatgacgtctttgtccatgtcaagacgcttgaagctctcaaagtctgggagcttgatcttgatggccatgtcgtcatcgacttggatgagcttcgtagcctggtagccttcggggtatttaaccgaggcgttctcgagattgagctggaggatgtgctgagaaccgcatggcttctcaatcatttccttagtaccgtcttcctgctcgacttcctcttctactgtgccaccacaggtgtattctgcgttggagcgggcgcctgaggagcgaatgaatgcgttgaggaagatgaggtcgaccagatgcattggagtcttgctgaggtcgagctcgttgaaggtcacctctcgcacgatgtcaacgatggtgttaatgatcgctttcgcatccttgagctcgagtgcagtcagaagattcttctgctcaccgaccttcagtgcgcggtacgatacgtcgcgcttgagttctggcacatgcagagtgaagcggattgatttcggattacgaattgccattcaatgtcactcgctgattttcttggtttcgatgtagggtttgttcttgaggaaggcgagcaggtcatcggcgctgaggtcaaccacgcgcgacttgatgtccttaccgagcttcgctgctgccaaccaacggtggtgcccgtcgatcacgaagtcgtccttgctcgagatgataggcttgaggtcccagagcttctcattgatcagcttgtcgaccttgtcctccgagaagtttccctgtgttggggtcaacttcttcggatcgagagttctgacttccgtgtcaatgcctgaggctttgaggtcatccatgaactcatcaaacttggtgagctggggcatggtgtgacgcatcttgcccttaccatcttcgacgtttggaacctcaagctcttcagcgagccagtcttcaaaggacttaatttcaatcgtcatggcgcttgtcgtagtaggtgtcataggtgtgtgagaacttccaaccgtgtttgtcgcttcctgctgcggtgtggtagcgcatctcactacccatgtaccacatcttttctactgcatcccacttgaagcctagcgccttcgccttttccttctcagcgaacggaaccttgtagtagtgaaggtaggtgttctgtctcttagctacagatttgacctttgcgttccactccttgttcttctgtgcctcaatgcgagccgcagagtacttattgtggtgaggcgaagtggcagcaaagtcgagcgcttccttttccttcacgcgctgttctgctgcctttttgcgcgcatcctcggcagcagcgtggtctcctgtccactcgtggtgcttagccatcgcatcgtagccttgggcgttcgaattgtggtagcgtgctgtctgtagaagtcgctgacctgtcttcgcatctcggaagtgtttgtcagcgatgcttgcgtactgcgggttctttctggtgaccttgatattcgtcgcttctgggttaaagctctgaatatgtccatcgtcgaacctgacttggacatgagtttgatggataggtacgccaggctcttcagacgttgtacccgaaacagcaagcacctgacccttcttaccatcaacctctacatggtcaccgactccgaaaggggagacagattccttcagcacttccttgatcttcttcgtgctggtgtctttgatcgtctgatcgatcaaatcttcatagcgcttctgcttggcctcaggagggagaactggctccctcatggccacgcctgcggtcacattagcagatgtgacgagaccttcgctcatgactgcggcggcttcggcaggtcagcgtcagcagtggaatcgcctggcgccttgtcggcagaggcttcgactggatcggtaccagcgtcgccacccggcagcgttccgtcgacatcatcagcagcctggtcgccgttcttcttgtgatggttcgcgtcagaaatttccttagcgccttcggcgaggaactgctcgaacgaaactacattgatctctagatcattactcattgttgattaccttttctctcattgatggatactgatcccagattgctctagggacattggccttgaaggctttttcatcgccagaccggatggcctcacgaacaacggacgcagaagtgactcgttccgtctcgacaaacctgacgaccaaaggaacgtcaagtgtcttgttggcgcgttcaagctgcgccctatactgcccaattcggtctgcacctgcatagacagtatctggacaatcaccaagtgacttgataatgtccgggagatatccattctcgaacgttgcgacccgaaggtccggatcaatcatcttgaacaggtcaagttgatagtcaacgtcgaacggattcttctccttgtcaagggacgactgcttacctctcacaatgacgatcactgggttgaccatcttactgatcactgccagatgtccattgtgaggcggctgaaaccgtcccaggtagagatcaaacttagccactgatcaagtccaagaacatgttagtgacaattttgtactcagtattatttaccctcatgactactccttcgaactcaggtcccatgcttcgttcgttcacttcgtttctctctttcacttcattcaagatgtattgcttcaactgctttttaatttcaagtgtcttttctctcacaagcagtttaagctctcggtcagcatgacgcaaggacttcaaggaacagattcctacctctgtcagagatgccactgcttgcttgaagtagcggaagtcgaggtcaagcgagaacgctgttccgctcaatccatactcgtctggatcaagctcaacctgatcgtagaagtattccatatcggtcgccccggtgtcgcatctgaagaggcgatacaatgccaggtgtaccttgcgacctttgaagaacttgcggtcatacggcacgtttacaaacgtgatcttatctccgtccaccttggcaaagttctgatcgaacacctcgacctctgcgccagtgtttggcatgaacgtcttgaacagttctgacgcccagagatcgttgatgagatggaaatagttctccgcccgaccaaatgcttcgtggtcatagccttttgccatcgcataccaaatcacttcttgcgggtcgtagagtacgtctgacctcgcggtttggaaccacgggcgaccttcgctgtctcgtccgaaccgaaggaagaagccatccagtttccaattgaacaggacctgggtgaagtctggcattgactcaatccagcgacagaactcgtaatcgttcatgtcgtggaggtgtttcatgttcttgcgcttcttgggtgcaaccgtcataggttcctcacaatcgccttgggtggtacacggtcatcgactacaaacctagctgctgagaagtctcccgcgcctgatgtgaagatgcacggtagcccgtacgaattcatcttagtgaaattgatcttgaccacattgttgaacacgtttcgctttcgcaaccgcaggtagtatggtttcttgttcgcatacttctcgacaggaatgaactcgccgttgagcttcattccgtcgtactcaaccttctcaggtccaatgtataggtagtctacctgaccgcccatctcagggcagcctcggaacatctggagcgcgtaggtgtatggaattccgtacatcagggtcggaatgtcagatatattgtacatctgtccatcgacaaaccctaagctgcctaggtccatctgtacttggtagtacaccttagcgattaggtcaggtaccgtgcgctgcataccagcaatgccaccagacccgaggtcagcagcatgtgacatcttacatgagacattgtatgagaaattggtttcgtcccacacaactacatcgacaagattctctttgccgtgcggaccaatatctggagcttgctgcgcgcgtgtgatcttgtatgtgaagttctcaatatggacaggttggctccactggttgataacatcgaccaatgctcgttcctgtcgttgctggaactctttgtcgcgcacgtcgggcatggacttgtctttcggcacaggcacgaagcgacagtccttgtagaagcgagtaataggcacccacttctctcccgtgagcagctctggtggctggcctttaacgtccgtgcagtaggtgacgagctcctccttagtaggagacaccgtagcagccgttctcagcccttctacggtgaccttctcaccatccgccttcttgcctagggtcatctcgccttgtgcgagggcgataccgatcagaagttctgcgttgttcctctttaagaggtcaatagtcttgaaaaacgccatttacgaataggcttcttggtagtaactgaccatcagatgcataatgtcaggcgtgacggtgacgctgaggtagtcagtcaggtagtcgaaggcggcgagctttacccggaggtcttcgtggtagtcgcccttgacaattccttgagcgcctttgccccatagcaggttcgccattcccttgacaatgctctcccaatagatgcaagaaatgttctgatggatcagtcctacgcaccctgtgtatgaccccatccactccagctcttctgggaacggctttgccttgccaaagaagtggttgtagatcgttggtaggtcgcggatgaacgcggactcgtcagtcggaatctcgatccagacgttctcaccgacgatgcgctgatatttctcgcgcaaacccttcgggctgaacacccagggagtgatcgccatctgtttctgtttggtcttcatctgcaccgtagtattgcgaaggtgcatcgcggtcatcgcgcggaagatgtacttgtgagcgaatcccttgattcctgcgctaacgtcttcccagtcgctgctacggctaaacttcgcccactggtcaggtataccgtcaacgaaatcgacgagctcgaggtcaacctgaaggtgcaggttcgcacggacgtcccaccacatggtgacaatggtatcgactgacttgtgatagccaatgagcatgaaaccgtactcggtcgtgcgcatctcagcgagtgtctccatcgcaaggtcagcatcgttcttgtcgatctgaagatcaatatcgccgaactcgggcttataggtcaccagctctgcggtcgggatcagaccattgaataggtgcaccgtcgatcccgcaacgaaatcttcgaccactcgatctttcgaccacaggtatctgctgcgcgtcctgaaagccgctgcattgatatcgctgtagagctgactgatgcgatcgaggaagtagtcgcgtgtcagttgaccagtgattacgatcttgtcagcactcttgccgttgaaacttgcgttgccgcccattgcggatctcggttgattagatgcgagcagtctacgagaccgaccgatcgaaccgtagcgatcgacggtcctgtaccaaatcgacttggcccagaaacggtttccctttagtatcagacacttacgtaggttgtttctgtcgcgaaataccttagaatatgggttgtcagatgtcagcccgtttcaactaaaggaatcgcccaaatgtccgtttcgaagaaggcaatgatcgcagagcttcgtaagaagtttggtgacaccgtaactaccggtcaactgttgcagtacaaccgtgagtacatgaagcgcgcgcgtgccggcgagctggagctgtattctcgcggtgtgtgggccctcattccgaaggcgcaagtcgtaatggcggcgcaggggcgcgacgacgacggtgacgacgatacggatgacaccgacaacgagccggagaagcccgttgatgcagccctcatcaagaagcgtttcgagatgttgggcgtgctcggtaagggcatggttgcaggcaacattcgttcgctgatcgtttcgggttcggcgggcgtcggtaagacgttcaccttggagcgcgagctcgaggctgccgaaaagaagggcacgatcaagtcgtatgagtccatcaagggctcgatctcggcggtcgggctgtacgagacgctctacaagagccgaaagaaggggcaggtgctcctgctcgacgacgtggacaaggtgttctacgacgaagaggcgctcaacattctgaaggctgcgctcgacaccagcgctgtccgcaacatctcctgggcgaaggcctccaagtacctcagcgaccaggatatcccgaaccgcttccagtacgaaggccagatcgcgttcatcaccaacctcaacctggaccgcatcgcagccaagggcgggcggctggcgccgcacattctggcgctgatgagccgctcgatcttcctcgacctgatgatccacaacccgaaggccatcatggtccgcgtcgagcaggtgctctccgagtcgacgctcgcagcagatctcggcatcaacaaggtccagaccaaggagatcgtcgattggatgacgacgaacctcgcgatgctccgctccgtgtcgatccgaacggtgaaccagatcgctgggttcatgctgacctcggaggcgaactggaaggatatggcgcaggtcaccctgctcaaggctcactaaccggacaccctggcctagatgctgccctaggccaggggcttccaaaggcagcacaggaggttgtatgaaggctctcgtgtaccactacgatatggaaaacccgtcgctcgtggccaagctctgctggcgccctgaggagccgactgtcaaggaggcgtggaaggacggcttctacgagcaggcgtatgaggtggaggtgcctgacgactcggaagactcgctcagccgcgcctatgctgagacacaggacacgggcatcgctcgctccacttcggtcggtgacctcatcatcctcaacggcgccgcctatgcggtcatgccgttcgggttcatgcggatggaactgaccgcctgatgcacctttagggcgccgctggcatctgacagtctcaccggctccctttcagccccgctccggcggggcttttctttgggccctagtccgctagtgacccaggggctgatacgtaagtgcctgattttactaggcttttctgacagggcttcgtcaaaaatttcctagtaaaatcaggcacttactgtttctgatctgaaatctgacccctagaccggggtctcagtcctaacggcgcggcgatccaggattgagcggtactgcgacgccactgcatctagcatgaccaatgcggcaaggatatctttcgactccttgcccttggtggcgagatgaacagcatcttgtaccaagcctttagcccggttcatgctgatcttgcgatccattacccgacatcccacgacatgaacttctccttgaggttcgtctgatcggtcacgatcttggaatccatcttggtaaactcctccgacctgtcgtcctcgagaccgtacagtgtctgattctcgatgttgacaccgatcgtaaacgtcgtcttggttgccttgttcgcatatcgagacttgagctgcttgatgagaagctgctgcacctgatcaagctcgtcggttcgaatcatcgcccacataccgtcggctgtatgcgcgatacctgcggactcagcaataccgctcatgtcaacgtcggttgccgtcatctgtccacgattgaactgtgccgcagaccagatgaccgtgttggtctcaactgcgagcgcgcgaagttcttccgcgaccgacttgaagaagtagtacgagccaaccgaatacggcagacgatacgatgcaaggatctgcaggtagtccacaatgatcacgtctggcacgaagttttgcttcatgcggagctcgtcgagcgtctggcgaatgttgagcgtggtcgctgaggtcggtgggaactccttgaccttgagcttgccatacgacttgctcttgagctgctcgattcggttgaggtacttgtctttaccaagctcggtcagcttgttcatgttgagaccgaggatgttcgcgtccactcgctggaacactacttcctcgcgcatctcacatgagatgtacagaacgttcaagccgtctcgaatgtagtccgctgcgaggctgaccagaccgagagacttaccgacgttcgtacctgccacgagtaggttgagcgtcttgcgcgtcagaccgcccgaggtcacttcattgaatgtaccgatgcggaacggtaccttgctctcaggattggtatagtaatcccaacgcgcctcagcgtcgtcgaaatagtcttgaccaatctgagtgttgaagctcacactgatcgccttggccagaatgtccggcaccgcgtcaatcttgagcttcttctcttcgccttgatagatcgcaatggcctgctggataccattgtagacggatcgctgcttgcaccaatcctctgtgatcttctttagccactcgatgttcgtgctcggcacgatgctgaacacgtctgcgattgtctcgagcacgcgctcagtgcgaccttcatcgctgctgaggtcgttctttgcctcaacaatcagggtcgacttgtctggaacttcgttgtacttgccagcatagctgttgatcatcttgaacagtcgcttctcggactcatcctcgaagtactcttccttgatgaacgggaggacctttcgtaggtactcctcgttctttaccagagacgccaacaccaactgttcgttagttacatcactcattcgatctcctgctccacttggacgttaattctaacccgtccatgacctagttcataggtctctccgttcttgttctcaaaccagctcttgctccacggaccacgcagggacagcgcccaagcgccgctcggacctgcgatgatcttgtggaagcaaaagctaggtgttcgcttcggtttgatgctcggcttccaaggaatggtgtagttacctttgacagtatccagaatttcctcggtgacctcgcccttgagccaccatgtcaacgcattgaatgcgtgactatggaaagcctctcggcttccagggctaaaatgtagcaacacgatcgagaaaagggacttgcactcgatcaaccaataacctgtgacgccggagtctggtccgccgtcatagcttttgcgaaatagtttcataggtacgtcactcctcgtaggtcgactaccaaacgatagtagccaaaaccacaggcttcccactcgccgtctttgtcaccgatgcccagctctttgaacttgggcgcgtacgcatacgggtagcgcttccactcgaaccagaaggatgagttaggtgcgcggatgataggatcgtgtggcctcataatcattcactcgtgccgaggcaatccggcagacattgttggtcagggtcgggtgggttacaccacgaccacatgaacattaggaacgcgatgattcctagggctttccagatcatgttccgacaccgttgccccagaggtcgttctgtacgcggtgcgagtagagccaaccttctaccatgcagcgcttcgcgatgtctcgcgcgattgccttctgctgctcgtcagtacatgcctgtggcatgatccagatcggcgtggtcttcggcagacctgcagcatggtagatgcccatcacttccttgacctcatcgtaatcagcctcagagccgtctacgacgaacttgaagtactgatggactcgaccatggaacgaaccctgcagagcgtgctgcatgagtgcaatctcaggcttgatggcgtccttacggagctcaccgctgctgctgatcttcggcgaattgctccaggtccactgacgacgtgcgtcctgggcgagccattcgtagatgttgtggatgaattcgtccttgaacggcaccgagcaattcgtctcaatgaggtagtgacgagcatccttcatgcgctcatggaagatgatctgagggatgaacttccacttgagtgttggttcgccgccagtcagcgagacaatgacgccaagcccagtaggatagacaagcctccctccaggaatgactccaagcaattcttcaaccaggtcatcaacattgtacttcttccacatgtgagagaagatcgggttcacagcatactgactgtcgcatcccttgtggatcagcggaatgtcctccagacgctggtagtccttcggatcgaagtcaagcggagcgtagcccttctctgtgacgagcttctcaggattgttgaacagcgggcacgacagattgcatcgcgcgaaacgaatgtaagccgtcggatggaaggtgaattgtgcttcaccctccaacgacatgaagatttcagagacctcgaacatgctcattagtgcaccaaaccatctttgatccagtactcagcggtcacaccacactcgccatcttccgaaacgtcaacggtaatgtggcgaccgcgctccggatacttgatagccaccagacgtgcaacgtcgtctgcgatcatttcgcacgacttgtaatcgagaccttcgagcccaatagcattctcgatgtaattcaagaactggtggaactcgatctcgcgatcgtcgtggaacacctgtacgctgatcttaaagtggaacagatggcggtgcgaatagctcaggtactcaacgtcttcgagaccttgggtgccggcagctggatagcgatgtagcccagccttacggaatgttacccaaatcattttcatcttgtgattctccttagtgtgtcacaatgataaagcatccgtcagtgtcgtccaacggatgcttcatctttaaccaaacagctcttctaggttggtctggcggctgcggactctgtctgacttcaaggtatgacggaatgttgcgtgccaaacattgaaatctgcctgcgtcttgcactctgccaagcctgcgattggatgctggtgagacttcttgatgccagtcatgtacccatccgaatccatgtactcttcaatctgtgtgatgaagttatcgtaggagtagcggaaaagtgcaatcttgctcttcggaatcagcgggcggttgtgctcttcgccgatctgctccagagccgaatagctcggatacttgatgtagtacttgtagagcagttctggatcgtcgaagccaatgttgaacttcgagatgttgtccatcatccactggtagtcgcgcggcttgtaaccgtcagcctggagcagacgcgtaccgacataggttccgtctgggcggcgagtgtagaagcgtgaacgtgccagaccgccggtgtgcgttgttgagtcgtagctgattaccttgtccttgtagatacccgacttagcgagtgcgaggacaggagcgagacgatcgaaagagccaacacccaggaagtggatttgcttacagtcgaatttgaactgcatctgcgaggcgacaaatgccgactcgaagttttcgaggtcgcctggacccaaggtcgaggtcgcgaccgcgacgcctgcgatgaacggcagtagctcatctgggatgacgctctgcacatgctcgacccactcgtagtaggtctctgggcagttaccctgagcgatcaacattggcttggcgacggtgccaaccttagcgaagtattctagctgctcgacgaggttgtgcccggactcgatagccttctccttgagaagagagcgatcgaacaccttcttacgcgttgcagacatcgcaccgcgaccagcatacggatcgaagatttgcgagaccgggatttcgtcgaacgacattgctaccgtcgagtagtccgcctgagtcttgtagatcttttctttcgccgctgtgtcagccttcttgccgacggacaccatctgcagaccaccagagtcagcatgaatgtcgcacatcacgtcgttgtagttctccttgaacaccttgccgaaggtcgactcagtgaaggcgttgaacagcatgccaaacttgttcggaccgcgctcggcgcctcggaacatgttgcgcacccactcaatcgtctcatcgttcactccgccatctcgacggagtgaattgatgtacatgaaggaggttccgctcgcgatgtagtgaaactcgttaccgttgtagttatctgtcattgtcatcccttagccattacttcgcccatggtcttcgcagccatgaagtaccagtcgaggaaatgaggggcgctgaacggcgtctcacggttgaggaaagcgagtgccttctcaacggcttcatcgttggtgtcgaagaggaaattgtcaaagttacttaccagttcgttatgcgacagtccgcgcgtaagaattggtgccactccgaacatgatagcctctaccacacagtaaccgaagttttcttcgatagagtttgagagcatgaccttagcagtcttgagctcatcgtggtactgtttcttggtcagcccttctttgatggtgatcaagccctgacgctcgtacatgcgcgcgatgtctaccagccactgctggttggacttgaacttcgggcggctcgtcgtgacgacgatctctacgtccggcatccgctccttgatgagcagcgcagtgatcaggctctggtctgggcgcttctcatagtcaaagcggttcgtgatgacaatcttgttcgtcttgcgagctggattgaagtcactcaggtcatacgcctcacggaacagcgggttgcctgtcacgatgatcttcttctcgatctccttgacgtccgcttcatctgcaaacggatagactcggcgctcgaggacagcacgcttgtggtagttggagccgacgaacacgccgtcaaccgccttcagccagccgagctctgtgtacttctgatacggcgcggcgacctcgaaagcatcttccttagtgtacgatgcagcgtgtaggaagccataaatcttgatctggacaccgttgatctgtgccatgaggcgcagcgattcaatgccccagaactccaggtcactgacgaagaacacggagccgttcttgatctgcttctgacggaacatgaccgcgatcttctgcatctgtgcagccttgtagtagatcgtcgagttcatgtcgaggaaagagccagtctcgaccgcattggtcagcgactcgccatcgatcgtcactacattgaagccactctcagcaaatgctggcgggagaaacttgtaccactcgccggtgtagcgctcttcgagcggctcaatcgggataatgtaaaggtcggtcatacttctctatctccatcaaaatcttctggcattgtaaacaccgcggtgcctacttcccagcacatcacgaacagttcgtgctctaccttgatctgatcttggaagcgcaggtactcaagcgtcttgccttgtgcatacgaagcctgcgacgcgttccacatgatctctacacccgcgggtgcaatctcgcggagctgggtcagctccaccgtcaccttgatgcctgtgctgtagaacaccagcgcgacactttcgaggtcgagcaggttcaggtggtcgcagatgtagacatgctgcacgttgttatcgaaaatctttgcaaagagattcctgtctgtcaggtactcatctgcgctacaaaacaaggtcaggaggttctgatccttgtacttgccttccacctcaaagccaatcttagccattgaattctagtgtcctctctttcattgtaaccgtgatgtcagttaccatgcttctattgtaataggccacgatgagtctgttaaggtaagtctcatcctgttctccggcttctggctcaatgatgtcttctggcgggaagtagcctttcatcgttactgttgcgcccagcttaaagtaagccttcatcaccctgtgatcgcgctcaaccaaaccctcaaacaggtgatacttttcgttctcgagtagtacactttgcgacgggaacagttctgcgagcgcttgcttcttgagcagacgctctgcttctggtagaggcttctgaaacgactccatgtccaccgtgtagaacatcagcgaacacttgcggcgctctttgtattcgcgtgctgtgcggctcacgctcgcgtgctgcgcgtgcgtgtcgcgcgccgttggggcgaggattgtgtcctcggcgcggatagcagtgtggatctcttctgggatttcagcgtagccgctgtagagcgtcttgcaaaaccacggcataaaaccgaaacgctttgccgaagccttagcctcagcaatgcgctcttctgttaggtcatagaagtagacaacatctgtgatcaaaccgcgattgagtgcctgaaagcacccaatcacttcatcatcaacgtgcggcgagaatacgatattcctcggagacctcaagaccagcttctctaatgtattgccaaacatcatcttcactccaatcaacgatagggaacaccgaagtctgaccgaacagaccattatgagtaatgcgcggcatctcgaggcgattcacggtctgaccatcgatcacaacgtctgcgcttcggtctgtgcggttgttctcatcacgacgcgaaccgtccacctgagtgtctagaccgcgtgccgtcaggtactcgcgcatacgcgaacccggaacaatgtcaagcccatgcgatgcgctgagcttgtagaggaaatcaatcgtggcctcatggaccttgttgaatccttcgatcttcggcgagtgcaccactgggacaaaatgaccgaacgcctttttagcgaggtgatggacaatgacggaatcctttccgccactgtgaccaacatagaccgtcgcagggttacaagtctcgcggagccatgctaccgcttcatcttctagcttctgcaaatggatctgcatatcaacctcggatcagagacatcatttcgttacggagggtcgggtcggagcggaatgcaccgctgaggttcgatgtgatggtcacgccatccgaatcctcgacaccgcgagtgagcacgcagaagtgctgacccttcatcacaaccgcgacatcctgcgtgttagtgatgagcttgatcgtctcagcgatctggttcgtcagacgctcctgaatctgcgggcggcgactgaagaagtcaacgatgcgcgacagcttcgacagaccaaggacctgctggcctggcatgtaggccacccagcacgaaaggtctggacggtgagccgtaccaaagtagaccaggtgatgctcgcataccgacttgaccgagcagcgctcaatcaccatctcgtcgtactggagcttgttatcgactgccgtacacttcgggaagttatcgtactgcaatccgtagaagagttcttccacgtacatctttgcgatgcgcttcggcgtctcaatgagcgagtcgtcggtgaggtcgagacccagcacctggagtgcttcagtctggagcgcggtgatcttttcgatcttttccttgtccgagacgttgacaagctctgtcattggagtttcaagaccgagggccttgaggtgctcgtggacgcgcttgcctagtgctggatcagatttttctcttgccatgttcgtttcctttacgatttcctatattgtaatctcaacggagtgccgtttcgagaggtcctcggaacagttcgtcgatgatcagttcggtgtgtgtactaaggaattcatcttcatcttcgacgattttatcgggattagactcttccgctttgccggattttgcaaccgacgctttatttacaaccaatccttcctctgtcagctcgattccgtcaaacacgaaaacgtactgcggatagtcgaggtcaatgacctcgaggtagtctgctctagcagtcctcacatatagctgcattatttcaagtcctgtctgtcaatccatcgcgcgttcttaggtgctacgctgcgcttgatggtcaatgctctcaagcctttcaagagcgggtggctacggttacggtccttgtcattacgaatctggattacaggcctctcagcctcagggacgtctttcaattcctgccaaatttccgcgaccttcacgaacatcttgttcgggacgtcttggaagaagtcgttcatggtgaacgactgacggatgatcgcacccttgcccttcttgatgtcgctcccaaacagggcgaattcttcttccgcgtctgttgggtcgatcaagatgtcagggctaatctttcggatctttgtcgctgggtccatctcaaaattacaaagcgcgttctcaaacgcatggcggacagccctctcggcaatgtccttgagctccgagtctgcagatgagaagaacgacgcgttgtcttgcttcagcgagactggaaccatcttacctgctttggtccagaactcgaggtccgccttcttgtgacctgaggtgtcacgcccagcagcataaacctcgactacgcccttgatgacaaacgtcttgcgacttgacacgaagtggacatcgaccggctctccgagatactcgatgaggcggttgacacggtgcatcagatattcttcgttgtcctcacccgcgttgcctttgagattggcgttgacaacaatcgcagtaccgttgatgttgcaagcgaggttactgattcgacgggacccgtccagcctcagctggatttcgtcagcgaggcggacgggttcgacgttgtttcgcgtattgactgtgagtttgcgacctttctgcacaaccgtcatcttgctcttgcgcaggtattgcgtgatgttcgcaatagtcggagccccaaggaattcctccttgaggtagaggaagttgtttttcgacgggagtgttttcttagccattagtcgtcagtcaaaatttcgccagtgtcgtagtcgatattttcgccagccttgatcatctctgtctgcgccagctggaacttgttcttgagtgtagcaccaaagtctgtcttggtcaggatcggaatccagaactcagcagtgttggtgtccttctcgcgatatttcttatcggtgcctgcctgcatgtaccaaccgttagacggcttgacgacgtgcccagtctcgatagccaggtcaagcagaccagaccagcgcgaaataccgttctcgaacgtcacctcaatcggaatcttgctcttctcgcggacatagcgagacttctcgacgttgaggacgaagttgtaaccaacgacctcggtgccatccttgttctgctgacgaccaacgatgtagatgttgtccgccgagtagtacagacctgtgccgccgctgagaaccttcttcgagtacatctcgatggtgtcgtaggtgtgagctactacgtgcatcgggaagttcttgagggtcaggattggcgtgaccatgcggaacagcgacttgaacgccttcgcacggctcatgtctgcaacagacttgccatccagcgcgtcatcgacttccttcttggacgctaggttaccgatcgagtcgatggcgatgaacaccttttcaccacgagccaagcccgagagctgctgcatgatgtcaaacttcaactcttcgacgttggtgattggggtgtgaacaacacggtcgagcggaatgccgaacgacaggaagtacgactgtggtgtaccaaactcggagtcatagaacagagcaaccgcgtcaggatacttatccaggtaagccttcatgttggtgagcacgaagctcgtcttgaagtgcttagatggacctgcccaaatcgtcagacctgcgccgaaaccgccgtcgagctcacccgactgtagcagattcagaacggggatcttcgtctggatcagttctttcttttggaagaacgttgagttctccagtagtgcagtctccttaatggtagactgcttgcgtagcttatcaaccaaactcatgctcaagcgtcttctccttctttaccaaacttatcgaggaagttcttgacctcctcgccaatctcatctgcatcgccatctgggaactggaaatggtcgatgacgttgtcccacttatgctggaacaagacgggtgtgatgtcacccgtcattacttcgtcaatcgcctggagtgctgggaacatgcgttccagcacagggattgtcttctcaatcgcttcgatcacctcaggacagtccgcgaacagagactcttcctgatcgtgctcgtacatctgtacctcattcatcatcgcatttagaaacgcgaggatgtgagcacggactggtaggttcattcgcctgtgatctcttcatacagaaggttgatggcttcgtcgcctactcgccgttcggtgtacatcgcgagcagcttgacccggtgttgcatctgctcaagctcagcatagagctgctgcgagttctcgatagcgaggtaaagctcgctgatctcgcggacgcgctgatcgcgggtgtctgcgtcgaggtcaccaaacatgcccgaaggcacgtcaaggttagcgcggagctcgttcaaatgcaaagaccgacgaaggatctcgtcactagccttactcaaaagctcatagaagtaaacgtcgtgtctcatacttatcatcctcagccgaataggctttcaagtgtgctaatcttctctgtcttccaacccaatacgtcagtgaatgacttcaatggggtgatgtatgttgcgttccactgctggtccttgtcaaggtactcatgcaaaccgaagtcctttggcagcgttccaatgaatgcaatgttgctgcatctacatgggttgatcttcttgagggccatcaacttcactttgttaccgttcctgattcgatcaacggtcttctgcaaacccttctcgatgatcagttggttatgcgcgtatgctgcgcgcacatggtaaggagcctttggcatgatcgaccctgacttgtcgatccacttggtgagctccttcacacccttcggtgaagcaatgttctcaataggagcattgtagaactctgccttgaagctctcaatggaactcagtaactgttcctgtgtgcctgcgagtaggatctcgaggtccgatgtgagcttcttacgaaccatcattggcttgtcgcttcgagcggtttcaacacctgtcatcttcaagatcggctcgtggtaacgaacgtgttcgttgtcccatacgcgcaacacatagttcttcttaccgcggaagataccaacgtcaaagatcgcttcgcgcttcatgtccaggaggttcttctttgcgccgaggcggtccgagagcttctggtatgcagcgttgatgaacggagtgaactcttcctcaaggaacttgtcaatctcatcgaccgactgctggatgttgcgtggatcagtcggcaggttctctagctggatgtaagccgagtctgtgtccgaagtgatgacgtagtccttctcggtgttgaacttcttgttgaggtacctgttcatcatgttgccgatgtactggatacccagctgaccggtcaacgtgatgccttccgcgatgctcaggttgaagtaacggaacgccttgttcgcgcttgcgccgtaacccgagttagccagaaccttcatcgcgccctgtgttgcgtctgccgctgcaattcggttcacaagatcgaggtactctgcagaattcgtgctgccgcccgctgccaggaatgcttccttctggcgcttgaggtcaagcatgatgttcttgtacttcttacgagtgtcgaataccagcttcattcccttcgggagaacgccctgcacgtcctgacggtatgccgagccgttggctgccatagcccaacccttctcgcgacagtctgctgccaggtcaacccctgcgagtagcttctcgacccaatccagctgaccctgctcgccacgaaccaatgtctcagggctcatgttgaacatcatacagatggacgggtacagcgaggtcaagtcgagcgatgcgccccagcggtacttgcctggcaccggttccttaacgtatgcgccaatgatcttgcgatgcaccggattagtctgcggtggaatgaccacaccttcatcgttgagcagattgtagatgaggttgtcccacagctttaccttgccgttcatctcttggtagcggctcttcgtcatcaagacaattgccatgaccagtcggacgaactgcttcttctcgtccagacgctcaaccagatatacgtcgcgttcgttgtagtcgatgaacgtctcaaagtttctcgtatagagatccatgaggtcgtcgtactctgagtagtccaacttgttttcgtccagctcaacctcagacacgaaatccagcgtatagctgtcgtgcttgactgggttgtgcgtcttatacatgtcgtagtaatcgagcgtcgtcacaccgaagatgcggtagcccttctcggtgttctcttcgtcgaggtagtactcctggatgcagcgttccgtgtgcgcgtggaacgggctgagcttgttgatcatcttctcaccgagaaccttcttgatacggttcacgatgtatgggatatcgaattgctcaatgttccagccggtcagggcatccgggtcaaccagtcgaacgaacccaatgaagcgggtgaggaggtcagcctcatcttcacagcggttgtagatctgatccttgtccttgaccttgtagtccttgacaccaaacgtcaccttctgcgggcgaccaaacaccttacatgagatcgacgtgatctcgtatgccgtcttctgcttgaaaaaaaaaaaacacggatttctctgcggggctttcgatgctgggtaccaccgctcgtttgcgttgtcccacacctccatgtcgtcgctgagttctttcatctcagccacggtcattgtctgctcttcttcgctccacactcggcggacacgaacctcatcctcatcgtcgcacccgtcgaatcgagtctcgatgtcgaagttgagtacgcggtacttctcgaacttgaagtcgatcaagcctgggtagcgatgcgagatgaattgatgggccatcgacgtctgaccgaacaccggacaaacgccttcgtacttcttgataaacgccttcgcgtctgcaatcgtgtcgaactccattcggacgagcttatcgccgtatagagaccgatgttcaccattgcctttgataaatagctcgattgggaaacttgtaacgatttcctgatgacgctttccgtcatcatccacgtacctgtggaaaatcttgttcccaatggcatcacaaaaggtataaaacgccatgctagctgctctctccactttcttcgcttggttactgacgggcaccaatggcttcttgttcgcctcgggcgcgacagccttcatgttcattgtaacggtcgccgtgttcctcatcaatgcgattaggaaaattgaccttactcgcatgttctacgagccaggttcgaccactgtttcatcatctaagttctggcacgtcatcgcgtactttgtcgcgacgattgcatttctcttcatcaacatcactgcacctggtacagcgagtctggaattcatttggcttacttacctagccgtcattgctggttcggcgagtttgcagagcctgattactgctcgatatagcggcggaaacaatgctccgcagatggggcgcgatatgggtatgccgatgccaggtccaatgtacccgcaggagccaatgtatccgacccctagctatccgcagccgacgtatcctcagcctagctatccgaatccgtatgcgcagtatccaaatggttacgcaaatggaatgccggagccaatgatgactccggcatcgcatggtgttactgagatcagcccgtcagtagctggatacccgagccaaactgctgactgtacgcattccgaagctccggcaggggctcaaagatagagccagcgaaacggaagtcacctggttcaagtgtgattttcgtctctgtcgagaacataagaacaggcatcatgttcaacccctgaggacccggtgaaacaaacaccgggttttctactacgtatgcgccacttgctgctggcgagaactcaccaatgatctgacccgcttgggtccatgctagcttgatattgctcatcacttcactcctgttgaaccgaatccgcccgcgcggctggtcttctggtttggcttcttgtccagtaccttccaacctgtcagcggcttaaccactggcatgaggacgaactgagcaatacggtcgccatcttcaattacaactcgcgtgcccgtgttgttggtcagcgagacaaagatctcttccacatagtctgcgtcaatgacagcgacaccattggttaggatcaaaccctgcttgaacgacagaccgctacgcgaatggatcgcaaggtagaagccttccgggatgtctgcgaacaggcctgttgggatcaaagcacgctcgcctggctcgagatagatgcgggtacgtccttcaacgtcgcgcgccttcttgtcgagcttctgattcgagcggtcaaatgccatgatcggctgaccaggcatgaagtctgccgcgatgtccatgccagccgagaactcggtagcatagcccgggatatcacgaccactgtcttggaagaatccaaactcgccgtgcgcgttaccaaccggtgcgctgaagctgtcagcataggacgcctcaacaggggcggctgtcatgttcagctcgcccaggtcggtgttcttagtagctctcggtttcgccattgtcactgtttcctaatgaatacttcactttcaaattccacttctgcttatcgcgatatggaatgatcattacgtttgattcgatgttggcattgacctcaaccaacgacgtcaccaaaccccactgttcaagcagattgacgatgtactccaggcgatcttcgtcctcttccgagaagtcggttacgtcagttcgaccatcgagcaggaatagctgcttgaagtggacgatgtagtaccgaccctgcttgtggaagacgtggcatgtctgccagagcgtctgctgtccgtttctcttgcttggcaacccaatacgggtcaaagtctctcgcaccttcaggaactgatccttgtttagaggctcaatctcgaagaaggtgtcaagtagatcctgctttctgttttgcgacatttcggccacctttctctaattctttacgaatatcatccaaatacggtcgaagaagaccgagcacgtctttagctcgtttccgactatacccgtagtactcttgaattagattcagggactctgtgtcgtcctggttcttgtgccacttaccgaatcgctttttcttcggcagaccgtggtagtagaagtcaaattgtgcctgggtcggtagcgcccagtaacgattcatctcattcgcgaacaagacactgtccatcgtgttggacaacaccttgttgattacgtacgcattatagccaatttcttcaacatctagcacacctttcttctcgttgatgtgcgaggcaatatcgaagggactcattgattcacccatctcatcctcctagatatttagagaaattctacgtccgccatgatggtcgtcaacatagcgaccatgttgatttccttgtccatcacatgcccttccttgtagtcgtactccgcgaggatcagaaccagctgaggaatgctctgtggcttcacaaagaccgtcatcttgtcatagaggttgcgtcgaagtgcgccgccgtcgttgtcgaggtgatcgacaacccacttgcgcatgtcgccgaacttcttgtccttgaggaagccgaccaacgccttcaggtcagtatcgttgatgccggtctgactgttgatctcgaggacaccattcgccgtgtatcgctggatcaggttccacgtcttgcggaagtctgggaagttcttgatgatgacctgcgacagctcttctgcggtgaaggtgatgcccttctccttgagaaccgttgcgaccttcttgatgaactccatcaagagtgccttcttctcttccttcgtgaacaccatctcaacgattggtgctcggctcgtcagagcgtcgatgatctggttaccaaagttaccagtgaagatgaagcgacagtttccagcgaactcctcaatagatgctcgcagagcctgctgcgcgttcttcgtcagaccgtccgcctcgtcgaggatgatggccttgataccaccgccgaagctaacagtcgaggcaaactggcggaccttggtgcggaccgtttcgatgttgccttcctcagatgcattgatgacgatgtggtcaatgcctagctcttcacacatcgcacgagcgacggtggtcttacctgtgcccggtccaccaacaagcgtcatggtggccaactgcttcttgtcaacgatggcctggaaatacttcttcagtcgaggcggcaggatgcaatcctccacccgatgaggacggtagttctcagaccacaggtacatttctttctgttcactcataatcaaatactcacagttgatggatcagcccagcatgataacctgtttgacactacagagtgaggcgttctggtacacgttcctaacagcttcctcaccaatatgaccagcgtcgtcgatccaaactcgatcgactgagaagccgcgccacttgttggctggatacttgcagtcatcgcgcgtcattacgcgaggcttgaaagatgcatgtgctaggaaatctcgggcgagattactatcacggaagacgacaatgtctttcgacgttgcgcgatgttggatcgcagtcgtcttaccagtggcgcgcccgaggttaaccgaaaccgtaccaaactcgtagagccactgaagatggctcatcaccatcttctgatcgttgtgtctctgttgctgttggaggttgatctccaacagcgaatcgaggatcggtccaaagtgtttcattacttggactcgacggtgaccatgtaaacgagaccgcgcgtcatgtgcgtgaactcgactgcctgctcgaacaccttgacgttatagctgccttcgatgagcttgaggttctcgatcttgacgagcttctcaccggtgccggtgccttcagtctcaacgtcgatcgtgatctggttaccaacgccaccgctgttcagcgccgtcagcttgcctggcttgatcgagagctccttgagcttgagcgttgcagctgccttctgaatctggttgatgtttgcctcggtcagctcgaagctgaggagcggatcagtcaggacgatgtccttatccggcgggctaacaaccacagctggcgacgagtagaagtacttgatcttcgacttaccttcggtgatgaggatgtggtcttcgttgaaggtgaggtccgggttgccgaagaggctcagggtgccgaggaactcgttgagatcgtagatggcgaactcgcgcggaatctcatcgtcgatttcagcgacagcgaacacgttcttgagaacagacagagtgcgaagaagcttacccttcttgaacaggagaccctggttgatcgaggcaaagttcttcaggacattcaaagtagtggatgacaaactcataattacaactccttggttaacagtgtgactatagtaaatgacaacagcaaaggtctaaagggatccttggaccttgattagaacgccgcttcgcctgccatgatcagatcatccagccaacccttccaaccgggaatgtctagcttctctgggcgctggccttcgaagtgcgtgaaacgctcggtgatgacttgatcaccaagatcatagaggtagaacgattgtgcgagcatttggttcaccatttcatcttgtattggaatgcgacttcttgaccatggatattggtcttgaacgtgagagcttgattgcccttttcgacggtgacctgaaagccctgtggtcgaagctgcttgtctaggctcacttgtagattagacaacgcgtactgatcgttcaatgggaatctgttcttgttcattacgtcgccgatctgactcgcgacatacttcttcacttcgtcagttggattcatcgaagattcctcggaccttgaaacgggtggcttcttccatcaaccgcggttcaaagaacttcatataggaaacttcgaggatcgccttggggttggcggctttgatttcttctagagccgaaggtgcatcttctgcatgaagcagtcttgtgacgtgctcgccgccatcgcgcggatggctggcacgacgaacgccaaggtgatgacagaacaagtctgttacgtcggttgctttgttaatcatacaatcctcgagaagccgtcgatcttttcgatcttcatagtggagcggaccttgtctgcgatcttttccggggtgtgggttacgatgaacacgttgaggtccttgacgagcgacaggaggtcagccagcgcctcagcgccaccctggtcgagggaggagtcgaagatctcatcgaagatcaggatattggtcgccacgttgccctgcaggcgagcaatttcgcgccatgcgagcaggagtgccatatccatgcggagcttctctccttccgagaaggaattgtaccccagggtatcgaagccacgcgccttaatcgtctcgtcgaaattctcatcgagatggaagttgacaaagagaccgaggtggttcaggtgggaattcacttcatggttgatcaaaggaacaaactgcttgatcagcatagatttgatgcccttgtcctgcaacatggttccgatcaaagacaggtaatcgctcttggtgtagagctgctccagcttgtcaacgagtgccgcgtgcatttcctcgagcttcttgaggtcagcttgagcctcagcgatcttgtcagcctggctcaggcgttccttcttcgtctcagcgacaaggtaatcgcgcttcgactcagccgaagaaatttccatgtcaatggagcggaccttctcaatgtaggaatcgtacttggcgatggcgtcttcgaaatcatggacgagcttctcgaactcttggatcttcttcgacagttcgcctttcgcttcgtcgatcctcgcctttttaccagtcaggtgatccagctgggcggcgtgatcttccttctcgagcggacgcttacatgcgtgacagtcttgcgactcgttcaactgcttaagcgaggtctcaacctgcgacagcgatgcgtctagcttagcgaccatcttcgcgtgctctgctagctgtgtcattgccttgcgataggctgcacggtcaacgccttcgaccgactggatctgttccttcttcgcgtagagctcggcaagctgtgcgaggacctcagagacctgggcgttgatgcgctcaagctctgctgcctgattctgcttgtctgcgttcttgaggtcgttaatgtaagccttgcggatcttgaccttctcagcggcgacagtgatggccgttttgatttccgagatgcggttcttcaggtcagcggacttagcgttgtggatcttcgccatgtttgagaacacgatcaggttgagcacaacctcaacgaacttgcggcgctcgccggtgttgagctgcatgaacatcgtgttcttcgccttacccaccagaacaatctgacaggctgcatcgtagttcatgcacagaacttgctgttcgaagtacttctgatagtcgcggttagcggcttcctgattgatgagcttgccgttctcgtagatctcaaagatgttgggcttcatgccgcggcgcactaggtactctttgccgtcgcgctcaaactcaatttcgaccaaggcgtccttagcattcttggtgttgatcagatgctctttcttgatcttgcggaatggcttgccgaagagtccaaacgcgatcgtgtcaagcaggagcgagctcttgccgacgccgttcttaccaatgaccatggtagacggcgagcggtcgagctggacttcggtcatcatgttaccgaagctgaggatgttcttgaaacggatcttgcggaagtagatcattctttcttgctcgttagaacgtatgttgcgccagtatctttgagatggttgtagagctcagcaaatgccttgcgcgcttcatccatcggctggacgctcaagatctcttgtgcgagagcgcttggcgatgtctttcggacaatcgcaagcattgctggatcgaacctaggctcgaggccatttgtgctgtctgggaggctcatcggttgaaccacacggtgatctgatacttcttgagcgagggctggtagagcgcctcgacatcactgaaggtacgagcaccatagccctctagcattgctgcaacaatctcttcagtcggcgcacagtcgttaaagatgacggacttgatctccgtcatctcatccatgcgcggctcgaacctaatgtgtctgtcgatgatcgaaacgtcgaccgtcagccactcaatgccttcgccacctctttgcatcactctgtctccactagctcgagagcctcttggtacatttccttgaacatcgatcgaagcatgttcttgtcaatgtttgggctctgcactacatcgtcaatgtacttgtcaatgagctggttgttatcgacaaactcgatatcgccattctcgttgacaaacttcgtgtcgtcgatttcgatcaggtccgcgctatagacaaccttgttgagcttctccatgaagagcgagagcttgtgctggttcgtcgaagcgtatgactcgatgtagaccctgacgatcatatcggcatactcatcgtagttgaattttacgatgtcaatgtcgtcattgtaggcgattttagcgtacacatcaaacggattaggaatgaattctaaatctcgagtggtggtgtcgaagatgcggaatcccttgtcgagaccgtaatcagaccagtttgtctgtgatggattgctgatgtagaagatgcgaccgtcagtcgatacagtatggaagtgtcccgagtacacctgatcgaatcggtcaaacatcgacttatcgaatccatgatcgcagacgtggcccttgatcatctcgaaagacttgatctcgaaatgtccgcacaggatggtcggcgggcagttctgcatgaactcaatgctctcagcgaggttggtattgtttacccagctgatgaaattgacaggagtgccgtcgaactcgatcgtctcatgcgtcttaacgacgtgcatgttcggatacatctttccaaggaagtcaatcgaattgatatcgttcctgttcttgtaggctacgtcgtggtttccgtagatgatggtgacttgaatatttcgttcctcgagacgatcgaagaacatctgttgggcccgccatagagaaacgctgtcgatgcgagtacgatactcccaagtgtcgcccagaatccaaagatgcgtaattcctctttcgtcaagggtaggaaagaaaatttcactgtagaacttctcgtagttgtcgaggaagaactttgacccgttgcggacgccaaagtgctgatcggtaatcatagccaccttcatgctcaggcttccttagcgtagatttcaacggcttcttcagggttggtgatacgatgcttgagcgcgtatgcgtgtaccgcagacggtgaatgcttggcgcctgcttcatctagcgcacgtttgatccgctcaatgaaggtcagggcgttcttccttgcggcttcgtctagatagttctcaaagtccacaggtcacctcagttgtgcatgaagtcgacagcatcatagttgtcgatttggaagttggagtagtcgccgtcttgggtgctgaagaactcgttaccagggtcagccataaccgcaagcttcttcgactggatgttcttctcataggcgatgtaactgaggaacgcgcgccatacgcacaggctgataaagccgaacgggttaacctcaccgttcttacccaggcgatgcgggtcaaacgaattcatcgcgcggactgccgccacaataccttcgcccttcatctcttcgatgtaggtgtagttacggaagttaggtcgagaggcctgaccctcagcaaccttcatgatagccatgccgaccgagtctggcagaggcggagccttcttaccttcagccagagccttgtccttgcgaatcttccactcgcagaggtcgttgtagagcgcctgcttatctacgtagtgattgttcttctttgtgtcttctgtcaatgctgaaaatgccgagttagtgcttgatgtttgggttgagatactgacgcttgaaaatgtcaatctcttcgtctggtcttgacgccatcgcttctttgagtcttacaaagtcggtgtagttgctgatcacatgctctgccggtcgtgttagcgacattgagcaggcgttcataaagggaaccggggtcaaatcaagtgggtcataatgaatcatctggttgaggtaaggagtgaattcgtactcctcaacctcgcctgtctctgggtgaatgtctacctcgaccacatgtggtcgaagaagcatcgttgtttctgggaacaccgcgatcacgaacccaatgatcagcattccgttttggtagtggagcattctaactgggtaccgctggcctggcacagcaacgatctgctgtgcgacctgttcatccgactgctcttcggcagttacttcatttggattgggatgatcttgtacttccatttctcccccacgtaaatcttcaaacgctctaagaagtgcctcaagacggtgttctgtttctttacaccgttacgtgaagtataggaaaggtcatccgcgatatcaattagtttcacatcttgtttgccttctgccgttcgcaggatacgcccgatggactgcaaggttcggatcacagctttgagcgggtgacagaagatcaacgagtgaaggttcttgacgttgacaccgacagcgagcgtaccgtatgaggcgagtaggattgcgttgttctcacgctcgaggatctgacggatctgctctcggtcatcgacgtctgtgccgccatggatgtagtacagtttcttccctgcttcctcacacattggcttcaacaggtcatagagcacctttccgtgcttcgcgacgtagttgaacagcatgagacagttaccttcctgtgcgagagcggttttcgctaggaggtagttacgcttagcgtgaccaacaatgaacttgatctcggcatcatagtccatgttcttgactaggtcaatctcctccttcgggtagcgaagctggaagcactcgatgttcagaggagcaaggtcgccgccatcctgaaggtccttagtcgttgcaactcggatgatcttaccgaagcgagcctgcatatccagctcgtgcatcttggtaccgtcgagagtaccagtcagaccgagtcggaatcgagcgtgacctagctggtcgatgatctgagaaatgctcttagcgtcagcaccgtgcgcctcatcgcagatgtatgcgttgaagcccttgaaccacgccttaggcagcttgacagcggactgccaggttgagataaccacgcggtgctcggtgtacttttccttgccagagtagatcttgtggacattgtctgccacagaccaaccatcggtcacatacgattcgaagtcagagtacatctgctcgacaagggaagtcgagggcacggtcatgaggatcttgccgtcgtagttctcgagcaggtaccgaatgatcaggtactggatataggatttgcccgaccctgttggcgacaggatcaggctcttcgattcattgaacgccttaaagacggcttccttctgataccacttaggcgggaacttgcctaccgataggagccaattccaaccttcttcatcaatggacgtacgactgtctttgaagtcgtcagggttagcgtactcaacggtgtagccagactcttcgcaccactcaaacagcttcggcaggaggccaatgtagaacgccctgtctttgatgttgtagagacgaaccttaccatcccagcgtcctgctttgaacgcgggcatgaacttgtagccgttgacaaagaaggcaaacgcctctgagatctcgtaggagataccaacggaacagtctagggttacgtggagctcattgcggtagtggagcttgatatctgacatctaatcacctggttatgcaccgttctggaagcgcctccactcaatagcattcttgatgaggaagttacgctggttcaaagtcttgatgaaagcctcaacaagttccgccttagccttctgcatttcatacttcgtcttgaggtcgttgagcaccgggtcagcatcaagatagagatcgagatcctgacggagaaccttgatctggagcggttcctgcttgtaaacctcgtcaggtgcctgaccaaggtagtactgctggcgttctttcttctgtgcacggtacgcatgctccacgccctttaggacgcgaagctcatcaatgaagatgttgtagtatttagagtgcagcagagggatgcgtagcgactctgtgtccagcttgttattgtctacagccgagtctttctcgatctcagcctggatttccgacagtttcattgcgaatgatctcaaagaattgataacgaaaggttgccgagcacacgataggcatagcgtcgttcacgctcgaatcaagcggaagcgccgacatcatggtcggataagccttgtggaaacgaatggcgatcttgtgaatcttgctcgagttggtgaagtgtagagtgatgttcttcatcatctcaggcaccactggctcggtcatggtcgtcttgaccatccaggtgaacaggctctcgtagttagccagatcctcgtcaacaaggaagttgatgttgagaggatcgaactcaatgcgattgctcggaacgttcgtctggaaattctgatacggagtgtccacgccgcccatcgaaatggacggcagttctgtggactgcacaaagtagttgacagcatcgaagcccggaatgtcgagcttgaagctggcgcctagtgctgggtttcgattgatgcctttactcatgcgtgtatttaaccgcggagcctgatgttgttagccatgttctgagcgacaatctgcaggtgctcaatggtgccaacattgttcacaataaggtcaccatcttgcatgtctacacccgcctcagaagcatgtactggcacatttggaaggtctggacgcgtcacatggatgagcacgccattgttcttcctgatccaatcggcttcgttctggaagcggacgtctgtgagcatcaagcctgtttccgactcgtcaagcctgacctgggccatgtggatccagatatcatcgcgcagcatctgacgaccgtactcggtacccattagctgcattgcacggcgcggactgaaaccccatcgaggatcaatggcttctttgaactcacggtcgtgatcgatctgatagcgagtccatccgaacaggaggcaacaagcatccttcagtggacctgcaaacgaatatcgctcaaagccaagtgtctgattgaggaaattggcaaacgtgtccttacctgaacctgccttgcctgtgataccaattagtcgtgtcttcataggtcgaagctcgtgcgatcacactcgtccttgatctcgttaaggacttcctgaaggtcatcacctacatcactgacgatattttcaatcgaacgcttgaagtaatttgcagcatcaagaaccgactcgtaattgtcatgccatgcttctgcgtcatctagagcttcgtcgaggtcgacttgcgtgcgctcaaggagccttactagctctggtggaagctccatccagttggcagcaagaaaatctgccagtgtcattgtctcatagatcttcattagaccgtcacctcatctgattgatatttcactactgcttggacccaattcgatccgccaacgaaactcggagcaccgaagggctgccatccatgctggagcatttcgtttactgttgttgcaagtccaatcgtatccgtagctctcaccacgaagtactcagctacacgcaacatgccattgccaaggctcatattcttctcatccttctttcgtttcaaatctggtttcaaatgcttttcttccaaaagcatgttaaccgtctctcggacacgacaaaagagaagtcagatcatagaccttgacgtttcttttcccatgccgctttcacgcctgcacgaattctttcaagctgctcgggcgtccgtttccttccatactgcgagctcgcaggaccgaacttgccgaactgcgaattcttttcaccgaggtgagcctctgacatcttcgatttggtttcgtcagacttaggcttgaagaccccgcgcttacgtttgtgttcctcactctgcttcttgcccttaacggcgtttagctgagcctgtgttccgccttgcggcttccctacgatgttctgattgagccatctagggcttacatgtgcgcggacacgcctgaggaatttcacttcaaacagatgtgcctcatccttcgattcgaacaccttgtgaacacgaatcacatcgggatcgccatgttgcttgacgaattccttcacatagcgagaggatgtcttatagacggtccagaagtcatcgcgagctgcgaccttgtgcgctgctctcattccgtagtaccaacggtcgtgggctgtccagccaatgatgtatgtgtatgccatgctggtatttaagccttgcggtagtagcgagaactgcaaccaaaacaaaacccgccgaagcgggtcttgtctaactctgagggttccttgcggaacatcacttttacatgatgttcttgacgagggcctttctgtagtagtaattggcgttcgagccgatagcagtcgagttgccaacgaatgggttctcagccatcgcgtagcgagtcttgaagcccagagcagcgttgaagttcgacggatcggtagcgcggtgcagctcaagcgggatgtacggagcgtagtacagacctgcgtcgtactgcgtcgaacccttgaagccgacgaggtaagcatcggtaccgaggtacggatcgatgtagaccttgaagcgacctgcgttaccagcgtatgttgcgccagttgcgtcaacctcgagggagacctggccagcaagagccggagcgtagtcgaggacaccagccatcgcgagagcggaggcaacgtcggacgacacgatgaggaagttacccttaccacggcgcgactcgatggcgatcgcgttagcgtcacgctcgatagcgaagaggaggcccttgaaacgctcgaccgaccagcgaccgtcagcgtctgcgttcaggtcgaacgaacctggggtcgttgcgaactgagcacccaccttagcggcggagtagacggtgcggacaacctgacggttgacttccgagatgagttcgttgctgaggatgccaacgagttcagcgtctgcatcgaggccatggacgcgcttcatgtcctgggcaagctcgatggagtagtcagcacggagctgacgagtggtagcgttgatgctgaccttgtcgattgtcacaccgaccgagttccacgcgtcaacttcgcccgccgccgttgtcttaccagtacccgtgccgaagccggtcaggaagttagcgtcggtgatcgcagcgtgcgtgccggtaccggagtacgcggtgtcagcttcggacagaccgaggatttcagcaccaccctgtgggttgccgtttggcggagtgccagccttacgagccttcagcgcgaagatcaagcccgacggagcggacattggctgcacaccgaggatgtcataagcgatgagcttaggagccatacgacggaccatggagatcaggacagggtcccagttctgcacgccggcggtcaggttcgaagcttccttcaggtagtcctgagtattctccagaagctgcgcagtaaccttcttgcgatatgggtcagcaatagcgtctgccttttcgctctctagtactggctcccacttctctaggagggtatccactttgttttcttcttgagacatctttttctcctaaaactctcaaatatgaattagacaattctcagatatttatgttctgagatttttgattagaacaagcctggacggttcagaagtgctgcgaccgatgggtcgatgcgcttctcattggccacggtggagacctggacagattccttcagcatctcttccttgaccgcttcgttgacgactggagcaacagtagctgccttcgcctgctcaacgatcattgcaacgccgtccttgaactcgtcgagcgagtcaaatgaaacagcttcgagcaattcggttaccttctccttctgcgtctcagcgaggtccgctgtagcacgctcgaggatcagttcgcgcttgagagtatcaagctcttcacgagtgtgtgcgaggtcttcgaaaagcgactcgtactgcttcgtggattcagttagggattcctggagctcggcgacagctacgtcttcgcgaacgtcgaatgcgttgcgctcaaatgcttccttgatgtagctgaaagcggacttcatgcgcgcgtactcttcggtctcaacgaagcgctccttgttctcggcaatgaactgctcgactgcgtagtcagcgtattccttcatcttacccgagacagactccttgatgtgctcgccgtattcgttggccttacccttgaggtaggaaccatactcgttagccttttccttgaggaaagcgacttccgcagcgtgcgactcttcaagggcttccttctcagcgtcagcctcagccttcgcctcttccttaccctttgccttgccctcttcctcgccttcgtccttagcagccttcatcgctgcctcgagaaggccctggatctggagagcggtctcttctgaaagctctagggtttccagaagtgcctttagttcgtcattcattacttactcctaaggttctttcagaatgatatgaaatgttctgctgtatttagttctgagaaaatgtggttacttggcgttcgacagcttgatgagcttctcaaagagctcaatcatcttagcttcgtcaaggcgacctgtgcgtgccaaggtatttacctcatccttgatctctttctcgcgttcaacgagcagaccgttctcccatacccactccttaccttccattaggttggtgaggtatgcgtcaggtgccgacgggtcagatacaatgtcacctggggagataagacggaagctctgaactacctttgcgcttgtcttggacttcttgtcctcaaacatcttggtcttgccaagagcgcgggtcgagatgcccatgttgacgccttcatccatgaggccagcgacgatgcgaccgttaggcgtacctgtcgtgaccacagcgcgaccaatccagttcgtaccatccttgcgaaggctctcgaacttgtgggacacttccttgtagtcattgcgtgggtctgtggccgggtggttgaggtgaccgacggcgcgacctagtgcaaggtcttccgcgatgaaacgctcgatttctggatcgcagagcttctccggatagatgcgcccgttgcgattcagtacctcagtctggatgcagatgccttccaggatgtacttcttgcgcttttcgccgccgacttcttcggtgaggatctcattacgaatgtcgtcaatgcgttcgactagtacttgcattagtgtttccctagtacaatttcgtggtgctgatgaccgtctgagcctgcgcccttgtggtagatggtcacggtgtggctggacttgggatgcttgaagacgtggcctgaagcatgctcagagtgatgccagccggcatcctttaggtggtggtgaaggcgcgagaccttgagcgatccgttgtagtccttgtggaccgtcgcagagtgctcgcctgtgtcgtggtcatggcttagcttgatgccggcgcggtgcacggcggtcttagcatccgccagactctcaaacaggaagtcttcgaatctcatttgccatgttccttgtggaattgatctacgtatccgtggaagtccttcacctttagctcgcgcttggcggccttattgatgacgtcaccaaccgtgtcagggttgagctctggatacttagtacggaccttcttagcgaccgtatcccagccatcggtatccgggaagtgggacgccacttcggtttcaatgatgcgagcaatctcagaccaattgtagtcaccagccttaggaccagaagcctttggctccttcttcggctttgcgacagtgttcttccattcctcagcttcgcggtcagtcttgacctgcttacggacaccgtccttcgagtaggcgaaacgcttccactcaaggagccagttctcaaaactatccttaggcatgtccattagcgtagtccgaagctcttgcggaaacgattagccttgcgcgacttgcggacaacgcgtgccttgaaggactgacccatcgacttcttggtcagcactgcgcgacgcatagccttacgcatgacagcgacctgagcgccagagatcttcttgcaagtctttgcagctgggtcccacttaaagccagggctgcactgcatcttgattcgcttcttgccgcggaagtttaccttgatcttgcgacggacttccatcatgtagccgttgtcagcgtcatcgtcccactcgaagtcgttgccgacctcaatctcttccgctgggaaggagacgagctctgggttgaggtacacgtagacgttgaactcgaagtccttgtcaaacatgatgtcgccaaagtcgtattcctgatcttcgacaaagccatggacgaggtcttcgcggactgcttcgatctcataggtatcgacgttatcgtcttcctcgagcgcggtagcaaagtcttcaactgccttcttgttcttgaacgtgagcaggatgacgccggcagcgtatgcgccttcgtccgaacccgtcatcttgccgagcgcgcgaatcttgaggatagcctcgcgctctgcgtcaccgacgacgttccagtcagcatccatcgtgtccttgcggacgtgctcttctagggtctcttccgtatccaggactgggaaaaattcgcccgactcgaggcgctcgtggagcttatcctcaagagacttgcggaagtcttggatgaaggaataagcattcagcttgtctgtatcaaatgccattcggttttagtcctttgttaaacgggtcaaattctttgtcgtcgaaggtggtttcgcgcgtatccgcgaactgctctggcgcgccttcaggcggcattggaggctgcggctggattggatttccgtcagcatcaagctcttggtgcaagcctgctgccttttccttctccatctgcttatcctcgtcctggatttccttgtcggacatacggaggacgttcttttgtacccacagcttggtgtagtacttgcccacatgaggatcgattgtatttagcaaattgagacggttgttgagaatttcaacttccttcgactcaacaaacgtattgtcttcagcgtagttccagaggatgtcgcgcttaatatccttccagtctgcttcggtgatgaccttcttcaggatgagatgcgtcttgagcaggtcttctatgatgaggatgaagcgggagcgaagagtgctgaggtacttggtgaatcggtactcgtcgcgctggatttcagtaccgcgaccaaagatacctgtggtctgctggtcaccgaaacgacctcgaggtacgccaagggcgcgccacagcttgtcgcgtaggtactcgatctcgtccataatgtcgttcgacgtctgaccttcgatggtctggacctcagtggacttgccttcgcggcgcggcagccagtagtcttccatcatggacatgatgttacgacggtcagacagagtacctgtcttggtgtcgtagaccatcttgttcttgaacttcgacatcatgtctttgaggtacgcctcagccttgttcttctgtagaccagaaacgtctacatagaaggcacgacggcttggggcgcgcacaacgcggaagatgatcattgcatcttccatcatcttgagcatgttgaacggtacaaccgccttcttcaggtagccgacatagcgacccaggttgcgatcgaacagtccagagttgatgtacgagatcgactcaggcttgatctggatgccctggatggactgcccctgctgtagctggatgacctggttaagcgggttcgcctttgggtcaaagttagagtagaggaaaaattccttgatctgagatgcgtcataggtgccgtccggattcggcttcggcacaacgcgcacaaggcgaatcttcagcgggtcaatgaactggaccttctgaataccctgcctgatcttgttgtaatctaccatcttgtaaaggaacagcttggaatcgacgaaccaatcgtcgaaccactgtgcgccgttcacgtcaaagtcaatgatcttgtaaagctcgtcgtactcagcggcgatcttgcgacggatgcctgggctgatcttggactcctttacaaagtcgatctcgattgccttcttaccaggcacgtcaaagatgaagatttcgtttcggatttcctgcaaggcttcgtcgacctcagccgatgcggcgagttcgcgatacgatcggatgagctcaagctcctcagcaggagtctggagaagctcatacgggacagacatgatcccagcatgatcgttgtaatagatgtcaggtactgcgcgttcagccgttacctcacgatcaagactgaacgtggtcaggtcttgctttgggtcaggcttcttgaaaaggtcgtagccgaaaatctgcatggactcatgtatccttcataggttcatcattatttaaccaacagaaagcccaggggttgcctgggcttttctgatccgaatacaccaagatcagaacactgttgaactggattcccaaccgttgatcgcgaacgtgacaggctggagtgcaatctggtcgttctgatcgtagccgagctgaatttcgccaaccatcgtcgggaacatgccgtagacgcggtagcgctggacttcctggtctgcgcggtcgagggtgatgatgtcagcctgcgcgtaggagaagattgggttgagcatctgcggctgcgcgacgttggtacggaagccgagtagctggtcctgccactgctcgaacaccgatcgaccgaggaagtcgttgtcgaggaggatctggacagtccaatcgccccaaaccttgtcgcctgggatcttgacctgacgacccatgaacggaacgtcgatcgcgccgagggtggactcaggaatcgaagccgcctggcaagtgaacgagatcttcgtcgccgcttcaacagcacgctggacggagagtgggaaagagaggttcacgcggtaacggttcggacgagcgccaccaccacggaagttgcttagaaacgagtatacatctgcgctcatgtgagctccttatcttgatgagttgagttgatctctatggactcaaccatactatgagatacgttggtatttatttgctggaccgtttgaaagtgtgaagtccttcgtacttttcgccctcatacgtccatccgtactgacgacacatgcgctggaaggatgcgtttgtgacgaacttgctgtagagctgcttcaggtcatccacctcaccttcaaaacggaagtgtgttgccttggtatgctctaggaccttcattacaacaaacgcaatgcggttgtaaacgtcgagggaggtcttagcctgccgcatgggcttgatgttcgagctaccgtcagaacggttgctaaacaccacagcgcccgagtctgtgtcgtaccctactcggaaccgttctccgttgtagatcatatcggtgaagacgtggtcccacttagattcgaacttgccgtcatcagcagtttcgttcatcccgtacttgatctctcgcgtaccgaatgcttcagttaggaattcttcaaacgtcatcgtagcctccacggggtcacgatatttaggcaaaagaaaagcccgggcaaaacccgggctctcaatgttgttgctagtcgtagttctaagattagaacggagcgccaacgatttcgtcgaagctgacgtcctgacggactgcaacgaagttcaattggacccagttgatcgagtagaccggcttgatgaagatcgaacctacgaactgacggttcatgatcacctcagcggtgttgttcgacttatcgcagacaacgcggaagtcgtcgataccaccacgaccacggacctgttccagcttcggcgagaccatgttcacaaagttggagcgcgtgaactcgttgttggtctcgaagaggtagtacttagcagcgttcgagatgtccttctcaagcgagatgaacagacggcgcgtgccgatctgaccaaatgcgctgttcttgccgaggagggtcttgtctccgtagaggaccgtaccgtcggtgttgaaggtgacgactgggttgatgccgaccttgtagatcgcgtcgcggcttgtcttgttcgggttgaacgcaagcgagacaacgttcttgaggcgaccgcgagtgtaaccacctgggctgacccatgggtcgttggtgttgtccacctgagcgcagagaccagcgaggtcagcgttcagcggaatccaacggtacttgtcgttgtagacgtcgtactggagcttccaacccgagtccatcacagcgtaagagctggagcgaccaacggtgttgcgggtagcgacaatgttctgcacagcagtggactgagtcgtgttgagcacgtcttctagcttcggcgagtagaacaccacgcagtccttacgggtttcagcgaggttgtcaattgcgttctgaacagtgacagtgtgctcagtcgagccgccagcgtcaccggtgaagatgagcgagacgtcaacctcttcctggttctcgaacagctcatacgcgcgggtgaggtcaccggcggtgattgctgtcgaatccttaccaccagtcagaggcagggcgagagcagagacgagcttcttgaaggtcgatgcaacgccgttcacaacgcccggggtaccccactctgcagacgaagcgacagtaccgaggatagctgtagccgttgcgcctgtaccgtcaccggtgattgtgacagtcggaggtgtcacatagccagagcctgggttagtgatcgtgatgttagtgactgcgccaccgcttacaaccgccgtacccattgcgcgtgtaccaccagatggcggcatagcgaaggtgacagtagctgaggtgtatccagtaccacccgaaccaatagcagccgaatcaacggtaccggagcttggatcagcaaccagagcggaagtcggaaccgagagcgcccagacgtacttcgaggtacggttcaggacgttgacgtagaagttaggagcattgtttgcgtccttcgagtcagttgccttcgacaggtacgagtaggtctcgaggaccgagccgactacgccggagaatttaccctggacgtcaacgacaacgacatggagctcgtcgttcttgacaccgagcgaatccgcccaatcggaggtacctggagcagtatcgaacaggttagcgtacgcccaaccttcgaaagtcgaagcgtcagcaacatgaacagcaatcgagtcaccgatcgagccaggatacttagcagcgaacttcaccgaagtgttagcggtgcgaacgatctcaaaatgctgggagttcttgacgagtagaccagcagcatcgtcggacgagttgatcgcgtcttcgtcagctgcacggacaatcttcagatcaccagtgtaagcgaggaagttgaacgccgagaaccacgagacgaagttcttgtcagttggcttgtggtaggtctgctccagctcaagtggattcgaaacagtcgtgatagcctcgactggaccccacgagaagtcgcctgcaaacgcaccgcccgaggtgccagactgaccaacgatgttggttaggtcggtttccttgaaaccaacgccagggctttgattagatgccatctataattctcctgagaatcaaaaatcgtgcttggacttaagcaatatgtctgtgatatttatgttctgaggttagtaaaagttctcgaacaattcgacgctgttgctgtagtcgtccatgccgtcgtccatgaaaccgaaggcagagtggtactcttcctcctgcagaatgttctgacggatgaggtcacgagtgttttggtcgaacgtgtcctcgaagtaaggctgtgctgcgaaccatgcaaagatgaccagagacattacaatgtcgtcggtcttacccttctcagcttcgaagctcgtacccttcttagagaacgagttgagttcctggatagtgtcaaagtcgttgatgattagctggttggactcgatcaaacccttaaggttcgagcagcctagcagtttggtcttctttgtcgtcttgacaccaggtgtgatcttctcattacgtgcgccggacagctttgcatcgttgttcggtgaacgcgagaggaggagattctcgtactcatagtccatccagagtgcgtccaccacctgcttaccataggtgttcgactccacgatgacgtatgcttcgttgtacttgcgaccagacttgtctactaggtcagcaaggagcaatggagacatgatgttggatcgcatcatgaccacttgcttgtatggtgcggtggtcacgtcaatgacagacatgaccgagtagtccttaccgataccctccgaaacgtcaactgcgatgacgtagttgtgccctgggatcggatcttcgtagatcttgaactcgcggttctcaccaaggagcttgatcggctgctggaagaccagacgctggagggtgttaggcgagaggagcgtgtccgtactgccctggaactcgcactcaaactcctgcttgaactggcgctcagacatgttcgagagctgttcgcggtaccattcctgagtacgcgctggatgttcagaccaatgagcatcgtcccagacgtatgcgttctctccgcggatagcctctgtccacagcttgtagaacaggttcataccgttaggtgtagaggtgatgatgatcttagacgatgcaccagacgaaacgactgggtatgttgcggtgtagaacggcgtgtcgttttccacccatgcgaattcgtcgaggtacaggaggttaacggacttaccacgaacacccgaaccacctgtcgcagcagttacgaccttcgacttgttgcctagctggatggagcccttgttccaaatgtagacaccaggctgcatccaccacgggatcgcctcgtacatttccttgatgcggtcaagaatttcgatcgcctggcccttctgctgcgcgagtacgtagatgttgaacttcttgttgaagatcgcgtaccacaggagcaccgcggcaaccgtcgtggttttacccatctgacgaggccagcggaggattgagaagcgattgtcaacgatctttttcatcgctcgacgttgatagtcgaacggcttgaagggaacagtaccttggtcaaggctcaaaatttcgacgtagttctctaggaaatattcgaagctctctgagcactttgcaatttcttcagcctggtagggcgtcagggctaccttaacgcccgccttcttgagattgtttagcccgttgtattggtcttgcgggtcaatgtacccagcataagatttatctaccatagtgtatccagtttgcattgtggcggacgagtgtccgaccttatcatactcagtgatatttagcaattgttctacaaaatgagatcaggactagccgtcggctatgcgtagtcacgacgtgagatagagcctgagtagtgctccacctagaacgattgaagagcctaacggcttaaagtgacctgcgctgctcacatagcaacaggtgtgttcacatgctcagagactgtgcggtgtgtgaactggcgggaatcccgaaagggactttcctgactaatagggcgtctacagcttccccgcgtcctgtcaaatggtcagaccagtcttgtgattgtttcttcaatcatagttagtgcctggatggcctaattgtgattgaattttctgagtggaagaaatagttagagacgaagaaggacggaacctgttagcagtggacggaatggactgctacgacttgactacttcgatgcactcgccgtcgatgacttttgcagcttcctgctctgccttcttcctatccgctagcatgttgaggaagtcctctgtagagccgacgaatactgtgttgttattcgtgacctgttggactggtgtttcctcttccgaaccggacgcggcggctaccttagcacccttaggcggcgtcttgatttcctttgagagcttggatagagaaatgttgaggtctgctgctgccttcataaagctcgcagctgcctgatacatcttgtccgactgtgcttgggaagtgacgttcatcaggtcagggacctgctccatcatctgtccgataagctccttcagattggaacgagcttcttggtaatcatcttcgatctcaggagcatccttagcctcgtccttttcgacggtaggcctaggcagagatgcaacaggagtagcagcgttcagggtctgcgagatgatatcaagtgcgtttggtgtgtcagtcatcatagttagatcgctcactcatatccacaatcgaatgtgggtcatcacgtccagccgacataggtgtgactgtcgaagtgtatttagagaagatgcgctgatagtcagtgtcaccgaagttaaggatcgtctgcttgatcagatttgtcgctcgacggtctgggtagtaataacccttgacagtgaagttgagtgtccacacgatagtgcggcgcgtatcaaacgaaccctcatagtcaatctgtagagcggtcgagttaagcacgatcggaacattcgtctcgagcttgaagtcctctctgtcacggatggtgacggtaagctcaggcgtgaagaacggaacgatctgctcaatgatcttcagcgagtcatcgagcttgcgcgcaccgacaaataggtcgaaagtcaggtcataagggatgcggttgtatgtcatcacctcttcgccgttttccatctcatcttggattcggttcagcggattgacatgacgctcaggcgcgaagttgatacctgtgagctcgaagcccatgcgcgggaaggagatatcgtagtcggtgtcgttcatgttctcaccggcgatagctgcttctaggaacttttccttctgcgagaagatgagcggtaccttgtaaggtctcccgaaatcatcgacgatctcgatctcatcgaagaccgtggcgaatgccacgatcagcttcttggttgtctgccagtagaaatttggacgggacattacttacccttgatagctacaatgttgcttaggtcgtcacggtcatcctcaacatgtacctcagcctcataggtgaagcctgtaggtgacagctttaggtcccagcggcgcttgaagtagcggtctgaaccgacgactgtgatgccaggagtttcagcgaggcggcgccatgtctttactgcgccagccgactggcttcctgatgcgagggggacgccctgcccaacgatggtctgatagacctcgagcatgatgccgttgccttggtgcttcgtgccgatgtttgcgccttcgatctcgtagccttcaccgaagatgccgagcttcgatttagtaacagacagagatcctgcactcaccttcggagtatcaaggagcttgtctacgagcatctcgaacgcgaagaccctttcttctgggtccttctcaccatcttcagcagtcagcatctcatagatcttccacatagccttgttagcttcttccttatgcaggatgtagaagacttcgcccttgaagactgtaggtgggatgaggatgtactcgccgcccttaattggccaagcctgctgctggatggctttgttcagacggttgtatagagtctctgccttctcagatcggaaggtacggatcaggcgaccgcgacgaccacggcgagacgtgacgccgccaccggcggacttcacatcatcggcatcaagtgtacggacgctgccgtctctctttctgtagctattgcggtcaacgccttcgagaaataggtcgaaatccattactttttcagccttttagcgaggtcggagtggtggttcatctggtggtagtgcttctgagcttcgcccgtgtccttcttgtgctggtgatgccagaacatctgggagtggtgcagcgacatctcattgtgatgctcaaaggtgccgaccttatgcttgtcggcagcctctttgtggcgcttcgcgttgtcgagattgaagttctcgctcaggtagtcctcaaactgcattagaagtctccgaatggattgttgcgatcaaacgtcgtgatgaccacatcctgcttctgctcgatgatgtcttcgttgatgtcagtggagcccttctgcaggctgtccattgcaacgtcaaactggtcaagcgcaagcttgccagtctgaaacttctcgcgagcacctgtgaaggtctcacatacgagcttgtaggtgaagtggcgaccaaactgccagtctgggttgttgaaccaaacctggttaatctcaaatagggtgttggtgagggagaagtctggattgtacggatcgccaatgtagatcagatcgccttccatagggcgcgagcgaccggtgcccagctcagcgaaacgcttcttggacataacaaggtcggtggtctgattgacgcggaagccaaacttagacatgatgctctgatcgccgttgtactgataagcgtcaggctggtatgcctcgatgatgaagttacggcgaaacacagtagccttaggctcctgtaggatcggatcgatctcaaagatttcgcgcgggatgtagagcacgtcctgaccgctcatttgaatcatctcgatgacgagatcttcaaagaggtcttgctcagacgcctctgttgaattgttgaagtagcgattgagggccaatgtcgtatctcggttggtgtgccgagatatttatcaaactcagccgacgaagaacgacggtggctcttcgtacatgtcgtggagctctgccttcagcgtctcaatctcagcctgcgcttcctgtaggatttctgcacctgaaagcgacacgccacctggtagctgcgcgttagtgaacttgatgaggttggtaccccattgcttcttgatcagagcagttgcatacttcttgagccagcggttgttgtaaacgtcgccgctcttctcagcgagtaccttgcgatagcactcaatggccacccagctaccctcggtgatctgcgaccagtcgccatggatgtgcaagcgatcatagtgctgattgaactgcaggcgatcatcggacgcaaacgtgtccgtcatcgtgttcaggtacgactgggtgatgtagtagttggcaagaccgtcacccatcacacgacgtgggttcatcaagtcggtcatgtacgcctgatactgcaggttgttgttcgcaatacctgtgccgcccaacgcgcccgagccaccatggattacacggaggacagactgggtttcagcgggtagggtgatatagcgattggcaatgtgcgacgcattgatctgcacatgcaagaacacgagctccgaaccatcggagtgatactcgtggaagagatcgaaggcatcgtctacacgatcttcgacctgctggtcatcgacattgatacgtagaacaggcgcgccgagagctctcaggcagtaatttttgaactcttctcttgagttgatgcgtgccatttagtgttcctggtgttgagcttgtcgatcttatttagagcctggctcatcattgtaacgacatctttgcatgtgacgctacgggacagatagtccgatgcctctctgacagtggcttcgtaggtcgcaatagatgcggtgatttcttcaatgttgacgctcatgatttgcctgcgagtagagcgaggattgcatccagcttcgcattgacgtccttcacttggtcttcaagttggtcaatgcgtctggcttgcttgttgcgtctcattgcgcggagatactcgtcgtggttggtgtttaccacgccgcctccgcgcttgatgaggtctggatagtctcttactttggcgtccattaggtgatagcgatgattcggagcgattcaaagagaggtggcttggaggagttgcgcgaacgaccaacaagcttgagcttgaaggaagtaaacggctcgtcagtccagcctgggtagttgacagtgtcaaatgtgtacggtgtgcaatgctcagacgccacaatgttgtactcgacaaggtcacgggtgtcaacagacgagcgtggcttggtgaatgcgtttgccttagtccagggctgcgcttcaatcgaacccgaggcgtggacagggagcgtcttgatgtagacgtcaaagtcagcgttgaggtccttgtatacatcgaggtagatgtggaggtcgttagctgcgttctcgaggttaactgtacgggtgacgtacttgtaaatctcagtaccgttggaaacgtcttcctctgcaaaccaatttgggttgttcgtatcaactgggattgcggtaagcttcgccttgtcctgccactcagaacggttgctgatcgttgtcgcgctgaaggtgtccatgttcacaaccggcgagctgttagcgtcagtggttgagaacgtcgcctggacttcgatagaacgtccaccagcgcccaacatgatctgctcgttgacggcggatgcaatcttgagcggctgaccgaggaagcgatcttcctgaggaacgaaggagattggtgcgagcttctggtagttactggtctcaaacatcgagcctgcatcgccatgaccgatgccgtggaggttccacgattcagttgcacggtatggcatgtatgcaccagacacgttgaacacgtcgtacttcgcgccaccattgtagcagacaacaccaacgccgccgaagcgacctgttgcagttgcaggagtagtcaggttgatgacgaacgcgtcttccgagctgacttcgacaacactgtgaccaagcgaaccagatgcgtgctcggtgttgaactccgaaaccgggataccggcgatgacaccacccgggtacttgcttccataagagttcgttacaaccgaaccgaagcactggttgagcgtgtagcttgcaggcttcttggtgtcaatggcgctgatcaagtaccagtcgcggacctcgcgagtctttggatcgcaggtgtaagtctgtccagcagtgaacacgccagagacttcgcggagcgtcacgaggtactgattagcggtagcagtcgacttgatatcggacacaatgccgcgaccagtcgttgtgtgcatgacctgaccaacctgcgggacgaagtcagacacgttgatagtgaatggagcgtcgtcgaacagcgagagcgaaacgcgatcacctgttgtgagaccgtggtccttgaggaacacgcgcacgcgagtctgaccagactgggtctggaacggattctcagggagcacaaccgcttcgtcttcgtggtcgttctcgaacacgaggttcatggtgcccgattcaaacttagcctggtagaggcggtacttgatctgttcgtactgctctgcgttccaagtcgagccgttcagcgagcggaagctgacctcggtggtcgtctgacgctcaacgatcttgcctggcatgttggtgacttcttcaccgaggcgcgagacccagaggcgagtattaggagagtatccaccgaccacaaaacaatactgggtctgcgcctcgacaaagataggctggtcaaagacgaccttgaacgcctttgaggagtcgtcagagatgaatggctgaatctgatccggagtgtagtacttgctcgcgatgacagtggtgcccgggaagccgtttaccatatcgcgaatctgcacgaagatgcggtcactgaaaacgtcgacctgcttaaagaacaggtcaagcgaagtgatgaacatgtcttcgttgatgatgaacgcttgggcgaccgggtcaccgcactcaccataggtaccaccgttagcaacacactgacagatttcggtgtagttcgttgggtggtatggcttcatgttctccaagcaagacggatctggcgaaggaggtgcaggagttggctcaggcgcagtacgacctgggttggtctcaatcggagcagccgcaggagtgatgatattgagcgtatgggtctgcttagtgacgttcagaccaccggcgaagtacttggacttcgcgctagtcgtctgcatgtctggatcaccggagagctcgggatcgtccgatagaacgaattccttctcacctgtgaagaatcgacccgcggggatgcggaactcgccacggagctcaccgtttgcgtcagtgatcagcggcgagccaaactcgacgagctgcgaagcggtagccgcgttcgcagcactcagctggaagccgatgtctcgacagtgttccgagacgttctgtccatcgaagaaggcatagacgcgagtgttcggcttcatctttgtagcgtagaactctacgctacgcgaacgaatgtacggaacaatctggacgtcttttacaacgtcgtcgatggtataggtatcggttctggattctactgtggacatttcagaccttagtcaattacatcatttggaattcaacgtggtggacgagtctatctccacctccgccaccaccgccgcggacgggcttcgtctctggtggtgtctggattgtcgtatttaggtcgatgtgagtaccccagtcaacggtcagcacgcgatcggtgacatctggatctggtgcaggcagcggtggctgcgtgacagcgatcggcaccactggcggcggtacgatttccttgataggctcgacgttcgcttcgatgttagtgatgatctgcggcaggatagttgtgtccgcccaggtgtcgttgttcggcgacatcaccatctgacccttctggttgtactgcatgtaagggttgacgctgaggtgcttagtagcgtatggctgctcaacagcaagcgactcggtatatggtagggtcgccacgttgccgtgtagcttgaagttagacgacttgtctgggttgaacttcaacttacggttcatcgccttgaaggcaggacgaagctggcgcttggaacggtcagccgcagccttgaactccttgttcgtcagatcagccgcctggaagtcctggaagttatcgacgatgaagccgttcttgaagcggtcgaagccgttagcgtccttaatcgaaagctcagcagccgacttctcgaggacggagaggactgtgtagtactcgatgttctcaatgcgcttctcgagcgaaccgatatcgcgcatagtgtagcggcggttctcgatgaacttggtgcggatgtcgttgagcgtgtaggtgtaagggctcaagtgaatctggtagagcgccatcgcgttgtcatcggtgcgaggaacgcgtgggtcatccgaaggctcacccttcttgacatagatgtaaccgtccttgttgatctgtagcaggtcaacgcgggcgagatagtactcaacatcgaagatagcggtgctttcgtttgcagggagcacgacgttgattgggttggtaccaagaacgtctgggcggaagtcgatgctcgcagcgagcgggtaaacgacacctgctgacgatgtgtagcttccgagcgtctcatagctcacacccgagtcggatgcgttgagagctggggcataagaatcgacggtgaagtaaccctggttaccactgtgctcgaagtaatcgaagttgatcgcgaggcggtacgagctgttagccgagaagctagcagcctttgtgcggacgatcttggactcgaggtatgcaatgtcagtgatgttctcgactagcttgtactcgtcagtgatatccgcgactggcgtatctggcgaaccatcaacatagagcttgacgctcttgaggcggtatgcgtcagtgacagtcagaggaatctctgcacccaccgttgcggacggagccgtgttggtgttgatggtgaggttctgaggagtctttgtgcgctcagtctggtttgtcttgagcacgtcaatgatgacgtaaacagacgcgcctgctgccggagcaccaaggttgactgtgatgctagttggcgagaagttggtgacagggcctgggttgaacgatgtggttgcgcctgtgagcacataccagccgaccatgctgccaccagcgttgtcgaagtattcgttagccgaggtggtgaacgtgacgctacccgagccgtcagccacaccgttgagcttgcgacgaacaacaacattcatcgagccgttcagtgggtcatccgacgagcgaagagacttgacgttctggcgatcgatcttgtagatgagcgcagtctggttcgtgttgtagagctcgacgacctcagtaacaggatcaacaaccgcattggtgtagaagccagtgttcgagacaacgtacgccttagcgtccgagagcttcttacctgcgttgaggttgagatcgtaaacgtagtagcggtaagttgcagtctgatctgcaaggttacccgagatgtactggatgtcgctgaccttcatggtgccgatcagagtgcccgcaacagacgaagcagttgcaacgccgtcatagatctggacaaccgcgtcagtgatcatgctaccgttgtgtgcattaggccaaatgccggcacccattgggcgaccgatcacgtagctgcgcgcgttgaagtgcttaacaaagctcgagaggctgttagtgtcgcgcgccttcgggaatacaacaggcgtgtccgagatagtctcaacacggtagcccttaacgtatgcaaccgacggagtgacaacagcgacaaggtcatccgcgtcgccgttcatcgaccagcctagcgggtcagctgcggacgacttcttagcgttgaggaacgagacgcggaacggacggatggtgtagtcaccgttcgtctcataggtgcgcttcgccatggcgtccatgatctctgaatactcagagtcagtcttcatgtactcaacaaccatgccagcaccgaggcgacacagtgggatgaagttttcgccgtcagcgttgtcgagcgaacgcttagtcagtacgagctcgaccttgtaacggtctgcacctggagccgtgctgttcggataaccgagcgacggatcgaggagagaagcgtcttcctgataggtgacgatggactgaacaaagtccagaccgagcttgcatggctcgaagtttacaaccttaccgtcgccatccttctcgaggtacttgaccacgatgatatcttggcgcggcgtgtcgatgaacatgccttcgtagtagaagataccttcatcgacggtgaagaactgaccgaagcctgtcggcggaatagtgtcagtgagccccgaacctgggcaagacgggcagcgaacagtaacagtaccgatctcgatcccgttagagtcgatgatgcggatgttctcacctgggatgaacgtcttggttacgccgtcgatagcggtgccagtgtagacgacatacaaggtcgctgggtcggtaccctcaacatcaacgccacgaacaagcgtcgctgtgatgccggaggtttcaccaatgaggcgagtgttctcaggatagatggacacaagcgggctgttcaacaggcggacaaatgccttagcctggagagacgtgcgcgcgttgcttaccttcgaaccattcttgaagatatggttggcgaaggactcaatctgatgctggaagatgctctgcacctggttgagttcgcgcgcttggactggacgtcctgggcgatacagaaccttgtgaaagcccttcttcggctcgaagtcatcgaaatatgggctacgatttaggtctagcttagacattgattaccttagagcgagatagagattttgatgacctcttcctgcgaagaagtgtgctcgatagctgtaatgttgttgatgtacagaacatagccgctacccttgagatatttagcctgggttccggctgcaaagtctgggtgagaaggaccaatgtatgctggagcgttcttcgtcgtaccacgcacacctgagacgagtgtgacctgacggaagctaccgtcggtatctactggctcagttgggatgaagtcagacaggcttgccgaaagacgcgaggagatgagcaccgaggagatgccaagctctgtgtcgaggttcgagccatgaccaccaggtggagataggttcgccttagcgacgccgcctgctgtgcctgggattacaaacgccttcgcccaggtgtagccagtaccgccagccgtcacgttgacagcggtgataagccccgaggagataactgcggtcgccgtagcacctgagccatcaccgatgatcaccacagacgcagtcgtgtaatccgagcctggagtgctgacagtgatcgagtcaaccgcgcctgcattaagctctgctgcaagggtggcaccttcacctgtgagtccgtccttgtaggcgattgcgaacgcttctgtgtaaccagagccaccacctgtcgcatagagtcgggtgagtgtcttcgagtttcctgcaacagtcgagcgcgcagaagccgatgcattagtgccgttacctgtgactacgaccttaattgtgtcagtgtcagcgaaaggagtagcagtggataccaagcctacaaaggtcgatacctcaccttgtaccaaggtgtttgaaacagaagttggagccgggacgaactgtggtgtgccgaacgtgaacatctcagcgccagaaatctgaccgacatacttccagatgtaaccgtcagccgtttcgatcagcgcggtgctagtgcccgacggcggatcaacagactcagcgccaccgttattgtcgaggcacttgtagacatacgactgtgatacgatagtgtagtgcggggcggtgtagccggtcgcctcaggatcgtactgcgaatagatcgttccagtctcccaagcatgattagcaagaccgaggcgcatgttcgtcgagtcgagcttgatcagcgcggtcaggtcatctagtgcttcctgctgacctgcaaccgaggtgtctggagcgtcaggcgaagcggggttagcccattccgtctgcttaccaacgccgaggtagaggttcgagataacgtcgccgtcctgaacagtgtcaagaccaagagccagccaacgaaccgtaccgtcgtagacagcgccagaggtgttggtcggacctgtaccagcgttcgtcacgccttcctgaatcgcgatgtacctgttattcgcattcgtgacctgtgcgccgagcgcatacgaggtcaatggagcacgagccgaagggcgcacagtcttcatagcctcgtacaagctagagatgacatatggtttaattgcaggcgtgaagctgtatgccatgttcttgaatccttaatcgagtaggatagtttcgttcaaatgtgttacaaactcttcaccgaggttggtagcgataccatctgttgctaccacatcgtgcgacgagttgaaggaaagggtcagggtgttctcatagatgatggactcttcgccaccaatcacaaggtccccagctgtgatatttaacccgagggcagacacgatttcatacgagctcgccttgatgtaccccattgggtgaaggtattcgttgacgaagctctcgtactgctttgcggagataggtgagacgatctcataggagaactgctggacgcgatccgaatcgatcagcgtggagtgctcagcgaggaagcccttatggtcaacccaatcgcgagtctcccaacggctaactgccttcgcttgcagaacagcgccggaacccttatcgcttgcaatggtgatagtcgcgttctcaaaatctacgaacgggttctccatgttgatgctctgaatagcaccaatgacattcgaggttgcctctaggcgagcctcagggttgccatctgtgtagagcgccggaagtttttcgtagttgtaacctggattcgttaccttgaatcctgtgagctgtccgttggggcctactgaagtaattttcgcagagaagccaaagccgtcatcttcagagcgagcgcggatgatatttccgacgctgtggaacgcgcctccagtgagcacagagatacccgtcactccgccccgtttggtacttgcgacggttgcatagccgtttagcttggctcctgctacctgtacgatgtcgcctgaggcatagcctgaccctgggttgaccacctcaatctgaaggatcggcttgacaaattctgacatctggaactcgcctgcagtaatgttgacaggctcacctacgatgtactcaaagtttggacgcagaatttcgactcggaaatacggcgtacctgaaccatggaagatctggatattttcaatcgacgcttggaccttgctggtcacacctgtcatcgtaccgccgttctcgcggacaaacagaacgaggtcctgaaatgcgccggagttgatgttgttcgcagtggtgtagatgaaatggcgctcgccgtactcagcgttcgaaggaacaagcatgttctcgcgcggatagcgaatctcgacgtccgagttgaacagcatacggaacaggaagcggaaggacgcttcgttgccgcggctgagatagaactcacggagcagatggatgagcaagttcttatcgaccgcaaggctctgtcccgcagcgaagcccaggtcagacacgattgcatcaatgtagggctcaaccttcagcgatggctcaaggttctcgcgccagttgttgatgatgccgaggaaattgtcgtcttgctcgagaaacgcgaggtagtctcggacatactggacaaaattcgggtagtcatcacgcacaaactctgggagcttgtgcgttagaactgggatcagactgttcttgctcatccagagactaccttagtggaggcgatgcggacgatgttgtttaggttggtgttgatgtctggaactgctggcgtcgccatgaactgaagcgttccagaagtgctgctctcaaagccctgcaccttggcagcaaccgggagcgaataagagatttgaccgttgtggtactgtactgtgccactagaagcaacaacgacagaatcatcattgacacgtagaagctggagaacgccattgccattgtccttgatgtagacggtttcggtaccgtaggtgatcggcgacgacttgatcgtgccagctactagctgattaccgaacatcactgtgctggtcgaggtcgagctgtgcaggtgagtgtgcttcttacggagcaccttcgacgagtacaaggagaccaacgctggatcctgtgccttgatgaaggagagcaggtcaacgtcagacagcacgctgtcaaacttcgagagcttagtcgagttgtactcacttaccttctcgaggacgatgttgaacagttcaggctgcgaacgtgtcgtcttgcggaggtcaacctttgcggtgatcgtcatatcgacctcgatgaagtctgggtcaacgaacactgggtcgatacctaccacgccaaacttcttgatgatctcatcgcggatctgcgagcgagacagcgcagtcagcttgtccgagttcttcggcttgatgctgatgtaagtcttaccgtagtcacgaatcacattctcttcaccgccccatacgttgagagactcgacgttgcggaacttgtcaaggaggatgcttcggcagtcgctagtcgtcacaatgcggttctggcgtttgttcgcctgagggattgcgaaacggagctcctcgatgctctgcggctccataccacctgctgctaccgaattggtgacgacttcggtgttggagtaaggtagggcgccaggctggaacgtgaacgtcttagcgccgttgcctgactcgccattgttgctaatgtagctaagctcaatcgcgttgccgttctctggctgcacgccgaaggtgttctgaccgaagaaaatctggtagaaaccgttctcatctgtggagacaaagaagaccttggaggttggaccgagatcaagcacgtccgatgcaagcgagtactcgtcataggtagtcgaggatgcgttttccttcacacgcacgcggaaggtatcaacgtctgcgttctcatcgcggaggatgaagcgctggttggtgaccgatccatcgacgacaaagttccaggtacggaacgtgccttcgtagatcttgaacggaaccgagacatactggacgttggagccgttgaccacacggttgtacatcgtcgtaccatcgagcaccgaaaagatgcgctggtcttggttgttgttcacagacttgaacgacatgccgcgttcaatggagatgctgcggcttagtggttcaagtgccagggtggtgttgaccttgagggtgacctcagcttgtgctgactgacgacctttcggaacatacgacgtgcgcttcgcgtggctcagaagagcctgacgggtgtgcgcggagtcaatgaacgcttcgtcgagaagcatcttaacaaagaagccgatgtagtgggtctgataggcagcaatgttgagctgagtagcgatacccgaggcttcaaagttgaagtcggcatagcgctcattgcctttcaagaactccttgaagttgttcttgatgtcctcaaaccggaggctgcttactgggagattcttcatctaattctctcgacaactaggttgaacgaatcgatctgattcatcgacttgattttgtaggtgatggtgatgtcaaagccatcgggcttatcgcgtggcaccttgatgtcgatctcttgcacttctacgcgcggttcgatcttagtgagcagccatctcaggtcgccttctagaccggcgcgggtgagctggttgttctgctcgaacaggtagtgcttcaagctagacttaacagtggggttgaagggaatgtcgaatgcgttcaacttgaatgcgtgtcggatagcacgcttgatcgcttcctgattgaccttaggggagaggtctcccgtcattgggttcgggatgaacgtcaagtccagatccgaaaagattttgttctcagccattagccagcctttaccgttgttgcgcctgtcatcatgaccgagccgcagtctgccttgtcgcctactcgcatgagagccctaccgttgacatacaccgtaggcgaacccttagccgatgtactagggtgacaattatcgcagcagtgtggctggatcttgtcacctactctgtgcgcaggtagtccctcgatgaatacgtccttagaggcttgtatgagcttctggggcggatagcatccgtggcccatggtcatatcgtttagtctgcaagctggaagtcccatagagcttatttagcacaacccttaggtccgttttcaagatcacagaacatttgtgtagccattgcaaacaacgcagattttagacagtccgtcacgacgatttcggttcggattgttggaagcagcgatggacgctccggctcaactgggcaagggggacagagggtttcaggaagtaaggttgacatacatagcctcgcctgagtagccgataccagtggttgggagtgtctggttcatgtagtcacgccactgagccatgagcactgcaaggttgttaggatcgagggtagggtctaggcggatttcagcaagttgaaggtagttctgatagttagacgccacagcaaattcaagctctgaatcaaggttctcctccttgtagccaaacttccctaggaggatctggaacacctcggacccttctagatcagcaatgaacttgttgatgtatgggttgtcggtaacgatgtccttgttcgccgtgtaccacgccacaacctcgttgggtgggatgtggctaagctcggcagggatcgggatgaggtcgaccttgttggcttcggtcttgttttggcagggctcgcacacctcattgataggctgcgggacgaactggacctctttcatctgctcacaaggcatgcactcaggttcgagtaccggtggcgcatctacgatacggacctcgtggacgttctcaaacggagactgctccatgaagttgtcaaggtcgaacgtccagttgttatggatctttacgcagaaccagtcttcgtcattcgactcttccttcaaaccatcgacccacacacggaccttgaagcgccactgtcgaccccaaggccatgcggttccgtcgttgtcggtaaagtaccaaccaacagcaggcgaaggcgagtcagcgaggcagtcgaggttgggcaacagacccttgatggtacccatgaagtccatagtcagaccgggaggcaaatcaccttccaagatctcgaagaacagtgcttcgttgcattcgcgtggggcagtaggcgaagagacaatagcatccatcgatgcgccttccgccatgttgatcaccatgttggcgacctgagagtagccggtgaactgtgcgacaaaggcgccagactgcggatttgctgatcctggacggatgcagatgatgtagtcaccaattgggaagtcgagagtgattcccacgaccgcagagttgatgtttgcagagcccactgccgtagcagtgttgttttcccacttgtaaacggtgaagatggtgttccaaacattgccactgaggctgaaattgaagcgcacagtctggaacaccggcgactgcaagcggaagagcttgttagccgctgacgttacactaaacggcatctgtgtgttaggaaacacctcggtcagatccgagatgcttcccatgccgttgatagactgtagacacgttgccatcttagaaacacttcgcacgaatggagtgggtgaagaactctagctccactgggactgggttgaacttgtccatgtctgcgtcgccgttttcgttcatcggaacaaactcgttgtccaagcagccttgctcgaggaactctacttcgtagtcagtggtgagcttaccgaccgacatagcagcaccttcgcccatcgggatgttgtcttcatcaaactcgagactgaagtactcgccggtcgggaacgacattgggtactcggggtcgaaggtcatcatctcaccgccgaagaagtggaaccaccacggagtgtcaacccagagctggaactgcatgtgcgcatctgcgtacattggcagctggaagttcgtgtttgcttccagcgtcattgtcatctcgacgccgtcgtatagggcgatcgactcgcagctatttaggtcgagatccacgagttcgacgatcgcgttgtcgccgtctgggatgaagttacccttacacagattgaagttgtactcttcagtgtcgatgtcgttgacaaacccagcagtgctatcgaagaagtcgagcgcgaggtatgttgggtcgacagtgtggaacgccgcaccgtcgcggaagtcaaacttgaagcgctgcagagtgctgaggtcaacggtgaagatggtcttgtcgccatcgtagcgagtatctgcagcaggaccagccgacagttcaacacgctcatgggtctcgtagactgggcagcatgttgtctcgagcagatcaattccaccgaagccgagaacgtcgtagttgaattcgtcacgagcagagatcggattcgggtagagaaggacctgagggagcgtagtgaacgcaatgtcaacacctgcgccgtcatagccacggaacagaccaatgccttcagatgggtaatccgaaagagtaaggttcgccgattcaccatcgaagccaatgatgtcgccggtagtctgctcagttgcaagatcgatcagcgcgaatgcaccgtcaaacatgcgccagtgttcaagcgtatcgagcgatagagatgcactagcgccatcgtagtttgccgctgtgcccagctggatagcgagcgagaggtcaatcgatcctgccgcgccttcgtagacattgacagcgaggtcagcggatgggttaatcgcgagatcgaatgctgtgtaggcgccgtccgcatagacaatctgcatcgccggcgaagtccacagagtgaacgtcgtctcagcaccatcataagcgttgaacgcaaagttgacagctgggttagtctggatgtcgagcgaagccatctcgccgtcgtagacattgaccgggaatgtctgcgtcgaagcaagtgctgcctcgagaacggcgccttcatagaccgacggagcagcgaggttcgacgacagaggaacactcaggaactcgtcaccacactgctgcacgccagtgatgtcaatgtacgaaccggaatgcgagtagttgcggtagtaccagaccgggacaatagtgttaggccagtctaggtctgtgagataattgctgagtacaacgccgcccgcagagatcttcgaacggaccttgccgccttccttaatcaactcagcacgaatcaccgcgccactgtataggttcagtccgcttggcttagtgaatgctgacgatgcatacgtagcgtctggacgacgatagtcttgataggtccctaccgctgaggtaccgaaaggcagccacgtacggatccatggcacgttcggaccaaccgaataaccatcgtacggtgtatcatattcccatgtgctgttgagcgtcgtgatcgagctacgcgcacggttgatgatgaaaccaaactggaacgctgcatcagagttgtcgttgtcatagtacgagccgaccatgttctgggtccactcgaaaccaatcgaatccatcgcagacgtgtcaatcgcttcggtaccaatgaccgaaccggaggaaccactaccactgttctgtaggcggaagttgctggtggtgagcgaaggagcagcgttctcgctgttaccaatgttcttgaagccgacgatagacgcacagccagttccacccggcgtcatcacttcaccgctgaagaactccatcgacacatacttggtagtgtcaagatcgaacgtcgcagctgcatcgtcgaacatgttgatgaagaacacgttgtctggaacttccatgtcctgcagcacaacggaagaaccatccgcaaagccgaagatgaaagacgtgacaagatcgacgctgtaagactcacccgctccgacattgatgtagtcagagaagtaggtgtagtcgttgatgttcgtttcacactggaacgcgataggtacctgatcgccagtgtaggttgtgcgatgatcaatgaacgagatcgagacctcgttaccagtgccacggaacgcgaagttaccacagccgagaagatcgaccgttgggttaccaaacgcgctagtggattcgatacctgtcggagcgaccttgcgctgtactcgtgtcgaaccaaactgcgacgatacgaaggagacaggaccaacagtctgagccggagtcggaggtacccatgcgacgttgagtgcgccaaccgacggcgtatagacattctcacccagccaagacgcattgaccggagaccatgccggcgcatattcgaaccaacggagcgcgtagcttgaaccgaacgtcgtaccactgaagccagcaggtgtgacgaacttctcatcaatgaccgacggcgcaccaaactcgtttactggttcaatcgagatcggagagatctggacaacagacgaccatgcagcagaacggttacctaccgaaggcgtgtaaggcttgttagcccactgtgcattgacagtgactgtcggcgtagcatactgatcatcgaagacaagacgcgcagtaccaaaggcagaatggtcattgcctactgtgtaagcaaactgctcgaggacgactgtagtcgaaccgaactgtacctgcgaaggcccaaccgtgcctgcgcctacatagagaccattaccccaggttgcctggacagaactacccggagctccataggccttggcgccgttccactgggcttgtaggaactgtcctgtaaggttcgcgttaggtgtgaacgttactgcgccttcagaagcatcaaacgcaaacaaggtttgctccggactaacgaagtccagagtgccttgaggtggggtatgcttgccggacgcaataaaatcaagtggcatcgaagctacctgcggcgtccatagcaatgtcagatagcgcgctcaacacagttagtaaatcacccagtatgactgagttatttagagcggtggcttagagcgggaagcctgtcgtagggacagtgaagttctgtccgccgtactttgctcgcgtcgtgactactgtctcaccaatgtatccagggaaccactgctgggcagatgaagctctcccagtgccatgataggtgtaatgagacgaaccgttagttccgagagcagaagtcggagtgttagttgacgcagctgccaagacaccattcacatacaggtactgcttgttgttgaagcgctcacccgacacaagtacccactgattcagaggcaggttagcagttgagatggggtaagtcggtgcgccactgtactcgtgatagaggtcgaccttgccatctgtgcggtgactcatctggacacggaattggtcagtgttaagcgcgccccagaaaaagaatgggcgagaccaggatgacggaaccgcagtagcatagatccagcaatcgatcgtatagttgctgttgaacacagatgcagcaagtggcgcgtagcggtacattgacgacgtgccattgaacaacggcgcctgggtaccaaacttcttgatcgccgtctgcatcgttggatacgtgaacaagctaggacctgtcccggttacctcgtcgttcgggacaagctcctggaagcggataaggtgaaccacgtctggatcagcagcaggatccggcgcgtagaagggaccacgacagacaggctgctcgataacacccttgtcaatccatgtgacagtcccatctacaaccgtggttccgtcagttggtagagtaggttcagacgccgctgtgctaccggctacggtgcattcgtaccaatgcccgttataggctaccggcatcattcgagcacctacagcgtaggccttggagttctcacgatactcacccatacgagtagtcgcaacacccatcaacggagcattgcgttctttcaatgctgtaaccgagtacgcgccagttacaggatcactcatacccatcccaacaaggttaggcgcagcagcgttcatgtcaaacagctgaatctccttctctcgaggagacccatcaatgttgacattgccagtgacagtgacgtagtttctaggcattagggaatcaacgcaggagtgacacgcgcatagacaaggtcattgaggagctcgccgctcgcagtatagaactggacgtcgtagccttcagcagtcgcatcgggagtcaagacggtgtagtcgccagtgacagcattcgaggtcgtctgaccaacaagcaatccatcactacgacggaagacacggacctgacgagcgaccgggttgttatcgacgtcgcggaccgtaccactgatctgcccatagttcttgttcacaatgatggtcggacgggactcgtcaccattaccgcggaacacaggcgacggcgtatcgagtgtcgtcttagctgcatacgtggtcaagtccaaagcaacaaaggccttggtgtttccgttgttaacctggatgtagagagtgttctcaacagtgtcgcacgcatagcccactacgccaaggctgttagtaccgtcgaggaggaagatatccttcgtagtgttgttagcaccatcgacttcgagaagcgctcggtagttggtgctaccatagatggtcgaagccatgatcgcgcaatccggcttcgtcggatgtggcattgagtaaggcccgtaggagttctgctgaccgttgatgtaggagccgctgttctggaagccggcggtgttattgatgatcgtggtgcgagtagtcagagcaggatcatacttcatcacatacggtgccgactcacactgtacgatgagccagttaccgttgccagtccatgagacagtcaacacaccagatgcaggcgcagtagttgcgttgacataggtaccatcacggagatcgtagacacggacgtatggcgtagtggtatgcacaaccgcaaggctgtaaccattcggcgacaaggagcagcgttgaacagtaccgagaccagtcttagtcagagtgatcaaggagtgatcggaccaacggaatgcgttgatgtaggaggacgcgtagcccacccagccatagtagtcattacccacgaagcaatcgaggacgtttccggagaaggcggcagttgcattggtgtccgtcgtccatccgtccgcgcccatgttgaaccaataggtcacgttgacagacgagttggtattgtggaacatcacacccttcgtctgatctggagacatcttcaggccatagcgataggcgttagtgtagctgcgcatgtatgtcgtcagctgcggatcttcaatcggaggaagaccctgtcgcagcatcatcgcaaacgacttctttggcagcgagtactgcgtagtagggaagaagagagctctcataggcggaagatcttgttagtaccgttgtcccaaacgacgttgatgtcaccgctgttaggcgtgacaggcagaccggatgcggtgtcaatgtatgcaatcaaaggcgaagaagattcgtcgccagtgtccttgtagatcacaatcgcttcaatcgacgcaccagcaacagacggaaacacgaggtcatccgaatccgccgcgccgtcagttgatgtcttgttcgctagtgtctggatagcgccaacacgagcacccacaggaaccgagtcaaagaactcgtgggtagcagagaaggtgtagttgccagtgtcaacgagcacagccttcaccgtatcagtggtccagttgatgccgccttcgaggaatcgctgacgagccttgttgtatagagcatttgccatggtatagaagtcccagtaatttcagtgatatttagacgtagggtccaacaggcatatcatacgtcgcgccagtgacgacagctgacccagtggatacacggaactcgtcaatgaatccgttgtgaccaaagcgataggatgggtagttgaacacgagctcatgaccaatagtgaacggctctccagtgttgatccatccctctacggtcgccacctcacccactctcgccccattgagatagagtcggaccatagtgccatcgaatgtgagcataacgtgatgccacatgccacgcgcacatgtaccaataggagtctcgatgaccttctgtccctcagtgccaatgttagcagcacgagcccactgtagacgtccatcctcaaagatagtaatgaattgatcggtagaagcgttctgtccgccctgcccgcatagggtatagaacttctgtgagtgagactcaccaccagcaccgccaaccgggtcgcaccagatccaaccatccatacagaactgttcgccagttgcaatgatacccgccgcagtacgaagaccagagtccgccccataggtacgcaacgatgtagcaccaaagcggtagttacgatgactgatagccgcattaccaaaggcagtccagctacgagtagatgcatcagtgatagcagtcgtaccaatggcatcaccaaagtgaatcagcgacttcatcgtaccaataagagatgtctgtacttcagcgcgctcagcaaaaggcgcacacggaacgacatagctatccgcagcgtatcgagcacgacccttagtgatacgatgagagatcttccccgcccatccgtaaccataccagtgagcaccaatgcggatagcattacgtccatcgttagtacgattagacaacgacacagcagttgagacaccattaatgccaagatagtgctgggtgccaacgcggctgaccatgatgtgatagagcttgttagcctcaaacgtgaacggcatcgaggtggaagcgagatatggatagacgaactccatgcctgagctgttgacacggatgttccagccatcatagtagttgtcatcactaccaatcacatagtagtatgatccacctggcgcgacgttgaacatgacaaaggcttcgaccgtgaagtcgccaccgctcaagatagcaagagatgggttagtggtagttacggctgtcgcgctggtgctagtcgatgtgaactcgaggaaggttccaccaaaccccgcgcccatctggttcgagacatttgtttggctgccgagagtgtactggacgtcttttgcatcacggaagttcacattgcccgtggttgcggttgttggcatcaaagttaccacgctatcgtataggccatcgctgttagcgaagtaacgagtagagttaggatgccacccagtttggttgtgcacaacgaatctctcagtccagttagtgccgtcattagactgctgcaccacgatagtcttcggagcgttgttcaaattgtcctcaggcgcagtaatgcgcagctcagacatacttctcgccacaggcaggttaaagcctacccacccggttctggcgttagaaatccacggtgtttttgtaccgtcttggaccgcatcaggaccgttgtctgggaggtaggaagatgcggtagctgaagcgtcatttaggatctgtgcaccactggcattcgttgcttttacttcagcaatgctggtgttcgttccgccattgttgtcggttactactaggcgatactgggaagcagggatgccgccgatcttgctgattactgtgacagtcttctttactgtgctgctgtccttgatgatgaggaccaatgattcgtttggtacgctttctacagtaatgctgagcgttctattgttgagagttactgtgacgccatcaggaattgctgagttattgtcaatttgatacgggagaacgccgccggtgagctcgtatgtgcgcgtgaatgtgccgtcgaagtactgaggagtaggcacaccgcgtagcatgatcgtgttatcagtccatggccagatgccaccgacgatcacatcgttgaagatgtactcgggcgcgtccttagcgatgatgtcgtactgttgattcggatcaatgtcatcgaacctgtatgtgccgttcagattgttcgaccaggttgttgcaatgagatcacggcgaccactgcgagcgcgcagctcgaggaagcgcgatgcaggagtgccttctactgtgacgattcctgggaacttgcccgcgatatagccggcaccaccaaactggaaacgcttggtgatcggctcgaatgtgctgttggacttaaacgcatattcataaggtaggttgaggttctgtaggtagacctcaacctcgggtgcgttcccacgcaggttgtaggtgaattgcccttgtggatcagcgtagaattgtactagggcgttatcagccattaccagttaccgttgcggacgtacatcgaaggccagccggatcctgttgtgatgaattggatcatgtctggaccggttgggtcatcagggagcttaccgaagttttcttgccagttgccggtaccacgaccagcatagccatacacgccgcgcagcttgccggtgatgttgtactgagtagcatgctcacagatgaaagcaggatagaagtaacgcacgcctgtgtatggcgagtatgggaagtggttggtgctacccgatggatagttgttaccgaaatatgccacatggaactgagaggtcttgttctgactcagctcctggctacgcgcgatcacagagacagcatacgagttgttgtactcgaggaggtgatagctcgccgaggagtagttggtatcgtagctggcgcacaggaagtagttatgtgcgttgcccgggacaaacgattcgaaatcgccagcaccatagacatgcgcgtagttagagatcgtcgtgccggtgctggatggtgcggtgttcatgtagaacgtacggtcatctgccatgatcgcccacgggcggttggtagtgtcgatagcacgatgccagtacatgttcgtgttgctatatccaggcgtaccggatgggatcttgtccacaccagtgttgatgtcagacatagagccaaacgcgctcacaatcgagtatgagtagttagtgtcatctacgcgcaggtacatacctgtcgagcctgctaccgctgggttgttgcggtagacagcaatgttagtaccggtatagaccttagtccatcctgctgctggcttgctgccatagccattgaccagcactgcatccagcagcgcgatcatctgtcctggattgtagttgagcgtcggtgcagacgcgtcctggtgagtgtagtgggtaactggcattatggaaggtcctcatatacagctggagtgatcggtccgtagacacgataacggatgtttggatcctgcttgttcatgaccatcaggtcaatctgagaattgtcaaacaggttgatgttgtagtcgcctgagttgttgtccgagagtacttcagcggcgagctgtcctgtgcgactcttgaaggcgcgaacagttgccatgtgagggttaccttcgagcgtcacagtgccacgaatacgccagatagtggagtagttgtagcgcattctgatctcagcatcatcgagcgcataaccatagacacccacggcgcacatatatccacgagtatttaggttacccggggcggcgcccatgaagtacacctgacctggtcctggatagttgatgacctggttaggcgcggttgttgatgagtgctgcacgccgtcaacccataggtcaatcactgtaccacgacgacgtagggctacatggtggaagcgtccatcgttgaagttgtaagcctgaccgttgtcctgaagcaaacgtgtcgaaacctgatactcctggctcactgagaactggaagtgtccaggctggtcgatgttgttgcgtcgattagcctcgaggaggataccctggtgagggaagtcatcttcctgacacgcccacacaaccgaacgattggtattgtcgaaacgtacccacaggtcaacagtgaagtcacctgagaaggagtagaggtgttcatagtgctgcccggttacattccacagcttatgcgatgctgccatgccaccattgtggaagtagacagaactgccgcccaatagctgtggaggtgcaggctgttcgcgtgcaacgcgcgcggcgccaccaaggagcgttgcgtccttgtagttcatcaggtctttaatggcaaagttagcagcattttctacatctgccattggccagtacgatgttgcttgggcgatgacgctcaggttgtcataggtcctggccttacggtgcaggcggcaaatctcatcgtgggtcagcgccttgttgagcaggaagacctgatcaaagcgagtatcagtagtctgtctgtcttcaaagtttgttgcaccattgatgatgccacctacttcgattgcagcagttgatacgctagacttgtatgtaccaacagactgctcggaccatgtgtaatagcagtgaccgttgatgtacatctttgcttcactgacgtacacgtctggatcagtctcaacgacgctccaggtgcaggtgatgaagttgcgcttgccgaggaaccatgtaggtacaggcagtcccatcgtaccaccagggtgggtccaatagagatcatcaggagtattccagttgtcctgataccagaaatcaaacgcgcctgccttacggacgaaacgcttgcgtagtacgtcagtccagtgcgtatagcccaattcttgttccttgtcgcgccatgctcggtcatctgtgttcttctggacaaagaagccaacagtgtatgacccacggttgtccgtgagcgcgaggtgagcctggtgttggacttcgatgaatgcctttggccagcgcgtagatgcagcaggctggtagccgtaccaaccaaatgagcatgatcgctgatcagtctgctcgaggtcaatgagtgacgggatacccatgcggtaagcaggatagttttcgtcctcattgtgcagcaggatgctactaccccaacccgactcatctagaaatgtctgtgggattgcagtgatttttcgtgtgttctcatcgaaggcatcaccgtcaaaggtgagaaatagcttcggttcgtgagatagtacagtttgcttaaagccagccatcacaaattccttggagatacgtaggtatttacctgggttgttctatcacaaatggtgtttagactttgatgcatgaacagacaagagaagatttcgtacctggccaacatccttgttggcgcaggcatcacaccagaaatgtcgaaggcaattgctgtcgatacactcgataagctgttcccggcacttcctcccatcgacgttgacgaaagtttcaatcgtcactacattccgctgcctggtggatatgaggtgcagaccaagggcaacggtagtagctaccgaattgcgtcggctgacgacgactggcgtatcaacatcccagggtcgagcttcgagcacgacttccttactgaaatggcattgtccatccgcgaggcatacggcgaatgaagtgggtccttctcatcatgctcaagacgtacgattgcagcagctaccattgcgccgataatatcgtgctgcaacaggtcccgatggagacgcgcgaactgtgcctcgccgctggcaatcaggccatcagaagtttcaagtccaacagtgtaggcgtcagagccctgtgcgttcctagcaggtattgacatacttccgagcatcggttggtgctcgtcctacccgataggtataatgcttctaaggactttgaacttagcaataggatcaaagaaaggaacatagaagaaacggagcctggatgaaactcctggcaacaatggcatgctatgaacagaactacgtacctgctcgctcacgcatgcttgtcggctgtgcacaccagcttgatgaacgcatacgcgaaccgtgatgatcctgagaaagttcgtcggcacgaaaagcaggctgacttcctcgaaatgaagtttaagaacgaattcaagtaccaccctctcacctacatcgagatatatcaaaactatgaacgtgcgtgcaaagaacaagggcttcaccctgattgagctcatgattgttgttgccatcatcgccatcctaggctcgattgcctatggtgcatacaaaggcactaacaattcctcggaaggaaatgtcatcgtcgaaacgcgatgtgtggaaggattccagcacgtcatcactattgacaatggcacttcgactatcacgaagatgactgacgcaaacggtcagccagtactctgtaactaaggagaagtaaaaatgagctacctatcatgggatagctacgacgatgcaaacttcgctgacctaaagggtaagcgtatcacgcgcgttgaaggcagtcagggcaatcgtcgcatcgacttcttcacggaggagggcgatcatttcgtcatgatgcacttccaggactgctgcgagagcgtctacctcgagtcgatcgatggtgaccttcagggcttggtgggcggtgtagtgttccacgcgtcggaagacacatccgacattgaatggagcgagtatggcgacaaggagatgtggactttctatcgcatcaggactgatcgcgagttcgtacacctgacctggcgcggcagctcgaacggctactactctgtgggtgtgtcgtttgtcaagatgaagccagtggaggaagacgatggcgacgcgtgattttgatccacatcacatccatgagcgtgctcaggtcgcgctcgttggcatcaagaattggatggagacccagtgggtcgacaagtgcaagacatcgtaccgcttccattgcgagtacatcgagcagtccaacaaatgtatcttccgtaaactgggctggcgaaagaagctcgacttgatgacattcgaggaatacgtcgaatggaagcgagcgcactatgatggatggggcttcgatgattacccgtcacatcgccgcgtctacgagcccaagatggctgagatgaggaagctcatcaagctgtcggaagacaatgggtatgcagggcgtcgcatcatcctcaatgaggacgactacaacatgatcgctgtctacgaggcacgcgcatgatcttcaatcgttactggatcagtgatagctcgggcagcggtcaggaacagtggtactacttcgctggaaacttcgcgctgtatcctgacgacgagatccgtcatcacattgtggagcagtatgaggagtgggcgcgatattctgattcctactcgctgcactacgagctcaacgtgacaccgccggtcgaacttctcgacttgcgtatcgcccaagcagaacagtctgtcatcaacaccaaccgctttatcgaagagctcaagacgctcagggagtcgatcatcaatgggtaatcctattccgccggggtatcagttgcgcatcgagtcgtgggaaaacgacggcgacaacaccaagtaccaaatcatctctggcctcacggaagatgaggcacggttccacatctacatcgcggaagcgtttggctcgtggggatataacaacaagaacggcggtccggaaaagtcgcacgttcagggcaacgacgagaacgaaattgtcgggtttttacgcctgtggaaggatgcagcggcactctacccggaggttgcaacgaaatactatgatggagagatgccgtcggaagagctggcagaacttttcgacgagtacatccgcctgcggtacaatagcccgcagaaggaagaccccaagtacgacgcggtccgcggctataacggcagcatccaccatttcctcgatgttttcaatgaattcgtcagcgaaatgctttcgtacccgggagagaactactgcgacttttacaactaccacaggtgctgtgaaagcattaaggtgtactatgtcccaggtgacatcgaagacgtcaccgacaaatttatcaacaactaaggaactttgatcagatgattatgcttattggtgctggtgtagcggcactcgtggttgcagtgattgcgttctgggtcatgaccctccgtgtcgtggtaccggcaaacgaagtccacacgctccagcgttcgaagtcgcagacctcgtacggtaaggaccaggaaggcggcaacacctactacaactggcctgcatggattccgttcctgggtttgacgcgcatcatcctgccggtgtcggtgttcgacctgagcctgcatgggtatgacgcatacgacaaggagcgagtgccgttcgtcgttgacgtgaccgcattcttccgcatcgaccagtcggacattgctgcccagcgtgtagcaaacttcggcgagctgaaagagcagctgacctctgtggtgcagggttcggtccgctcgatcctggcacgccatgagatcgaccagatcatgactgaccgttcgaccttcggtgacgcgttcactgctgaggttcacgagcagctcaagaactggggtgtcgagccggtgaagaacatcgagcttatggacatccgcgacgcgaagggctcgcaggtcattcagaacatcatggccaagcgtacgtctaccatcgaccgtgagtcgcgccaggcagtcgccgagaacacgcgcctcgccaagacggctgaaattgaggcagcgcgcgagatccagatgcgcgatcaggaagcacagctccaggtcggtcagaagactgctgagaaggaaaaggcggtcggtatcgctcaggaacagagccgtcaggaagtcctcgagcagcagaaggaaacgactgtccgccagatggctgttcgcgaaattgaacagacccgcacggctgagatcgatcgcaagacggcggttgtgaaggcgaacgaggtgaaggacgtctcgattgttcgcgccgaaggtgaacgtcagcaggcgctgatcaacgctgacgccgagaagcagaagaccatcctggtcgctgagggtgagctcgagaagcagcgccgtcaggctgaaggtatcgcggcggaaggtcaggcgaaggctgaggctgagaaggcaatgcagcttgctccggtcgaggcgcagatcgttctcgccaaggagatcggtggtaaccagtcctaccagacctacctcctgcaggttcgccagatcgaagccaaccaggcgatcggtgtcgagggtgccaagtcgctccataaggctgacatcaagatcatcagcaacgcaggctcgccgagtgaaggcgtcagcaatgtgctggacctcttcggaccgaagggcggcacggcgatcgctggtctgctcgaaggcgtcgcacagtccgagctgggcgctaaggtcatcgataagctgaccgcaccggctgcaccgtcgaagaagtaaggaacagacatgacggatttccggatcaagctggtcaacaaagacggtagcgtgattcgggaccgtcttgtcaaaccagccgatactgggctctactatcgccgaggctaccgaggtggcgaatgggatgagcgatggtgtagcacgatagtggaaatagatggtcgcgaacgtggtgtgaagtttatcaaatacctcgaacgtgacccgaagacaggcatcgtggcgttcgtcgactggatgtaagaaacaggaagcccggctcaggtcgggcttccttacaaccgaatcttacgtaggcctaggtgcggttgtcctcagcaacgaaatttctgtataatctaggtgcgggatggtcccgcaggagaatcacaatgaactgcatcgctgacggcaacacggctcgcaatccgctcgacctctacaacatgacgaagttccagcgcgaatggtgtgatgcccgcgcccagcaggaagacttcgatcattggctgcacactcgcgcgggcaagaagcgctcgcagggcaagctggtcatgtcgttcttcaccactgacggtcgcttccatgctgtccttctcggcatggcgcgcgtcatcgccgaagcgcatccgagcgagaccggcgccggtccgacggagaaggacaaggagttcgtgatccagttcattccgcgccagcctggccagacctggaacgaaaagcacgtccgtttcgagtgcttcatcaccgccttcaccaagtcctatgcgtacgacggcaacgccaagtcggtcgcggcgatcgtgtccgctgacaagtacgaggccgccaaggagtacctgcaggagcacggtttcagctacgtcgcagcagccgcgatgtaattcgtcaaacgggagcacggttcgccgtgctcccctcacggagaatgaagatggatgaagcagccatcagggcgcacttcgacgcgctcgccacgcgcattgcgctcatcggctacaccttcgtcggtgtgtttgaccctgaaggagagaagcccgcgttcgcttactcgatcggactgaccgcgcgcggttggcccgaaattctgttcgtcggcggactgaacccgatgacgacgcagatcatcctctctgacctcattgaaggatgggtggaagcaggcgaagtccgcatgggcaagaatgacgacatcatcaccttcatggatggctctagccacccgcttaaggtggtcgagatcgactccgagaaggcattcgcggagtacgcctgccaggtacgcgtgctgtttcctcaggcggctaaggtggtgcaagtgttgtggccagacactgctgggaaattcccggacgaggaaggctacaacgtctcgatgtgccagccgatcatcaaatgaagcacccgagactgaaacgtctccgccagctgaggagtatggacgctcctcgctggattgtgcgctcggaacaggtagccctgttgctagaccgcgagggactcaagttcgttggtatcggtaaggctgccagtaaacggcagcaggacctcatggaacggtttgtactaccgcacatgaagtagcgcagtcaaggaaaagccccggtcacccggggctttcttacaatcagatatcgccagtcgcctgcatcagcatgtcgcgcgcgaaatcttgagctgaccggcgagtacgcgaggcgcaccgtcaccgttgttgacagtcttagtcgaggcgagtgtcgcgatgtagagcaggttgccgcccgtttccgcgtcgtacagacctgcgcctgtgacggtgccccagttgccggttggtacgttgaacgtaatgtcagcagcgttggagtactcttggttggtacccgctggaccgttccacgatgcgccggtcgaaagaatctgcttacgaccatagcctgtgccagacgtgctgacctcaacgccgccggtacctgtcagagcaggaacagtggtgaagagagcaagccaaagcgaggtcggaggcgtataggctgcaccttcaaggaagaagcccataagctggttgaactggtagttggtagaagtgctagatggcattatgagaaatcctcggtgtgttcaatgatatttatgggtgcttcttggtgacgatcatggagcagatgtgccagcctttgcgccaaatgtagtcgagggcttctttagctgcctcggtagagttagtgcctggcatagtgaaggaagtttccttctcaagctgcttcttgtcatcagggtcgatgtatttaatcttgaaggtgtatccgtatccttcaaagaggaagtggtcaaatgtcttttccatgtgtatctcttagttgaggtcgatgcgcggcgccttgacagtaaactgggcacctgatgattcttggaacgatccaccagcgacaaatgagatgttgccacctaccgcgagcgagtaatctccctttacaacgtccagcttattgccagacacctgcgttgtgcagtctccattgacgacgattgttgagttaccaacgatatttaccttgacgttcccttcaacgtggaggaagtcatcgcccatcactaccaggtagcggtccttgacgaccttatccatcttagtgccgtcagggtggacctcagtgaaggtcccagtcggatggtagcggtgatagcgctcggcacctggggtgtcatcgtattcttctacgtgtccgccttcggtctccatgatcttgttgagtggatactcaggcgcagcaggagtcgttggttcggtccagacatttgagtttgcaatagtacgagccataccagtgatggcgcccacgttagggatagaacgcgacaatcccttgacagtagacacaagcccgccaaggtcacccatcgccttaataccgtcagctagacgctctacctgaccaatagccattgggatgctttgtagcttgcccattgcgctatcaaagtcgaggctctgtagcgcgcgaatagacgcctgcacctcagcggtttgctggtttgcaaactgacgcgcatactcttctgggtcaatgttcttcagggcctcaatctgtcccttgactgcgctgacctgtccttctagctgtgccttgagcgctttagcattggcaggtacctgcgcgatagacgatgcaatggatgagatctcgttgagtgagtctcgtagtccgcccatctcagcgacgttagttagctgcgcgaactgatccttgacactattgagagattcacgcgcgctgtccattgtggacttgatcttcgtctgcatgttctttactgcagacatgccgctcatagcattggaggcagcagtcgattggagtaccgactcctttttcttttgcaccacagtctcttcgagcttctcaccgcgcgcgagtttgttggtgtcaggttcatcctcgggcttacctgcaagcgagcccatgatgataggcgtctgtgcattcttgccatcagcaaagaagccaacaacgtgcgtgccaacctggatacctgttggcgatgagccgatacccgccttagcagcagacgtgacaggctgcatgacctgcgcccatggtaggtcgtcagttgggattgatccagcatcagcatggtagccgaagacacggaccttcagtcgcccgagcttctgcgggtcatcgcggtcctcaacgacgccaacgaaccattcgaagctgccgaatgagaaattgtgtacctgtgccattaggcttcctcgagtctcttcttgaccaactcagcgttgaccttgtatgtatctttgttgatcatgtgtgccatgtgcgtgatgacataacgaccgcggcgatgcttgtcaaactcttcatcagacagcgagtcctgagcgggtaggtcaacatcgcatgacttaccgaaccacttggctgcacctgcggtacctgggaactggatgatcagcttctcttgctcaaacttcatcaacgagctcttacgggaggcgatccacgagtcagcagtatccgagtacgattcctgattgaacatcttgctgtgcttcggaatgaagctaatgttcgcgtcctcagtgtccatcatgtattcgctgtcgaccttcaggtacttcttgtcctcagcattgtcgtcaccaaacttaaacgtcttggtctcccacttctttgtaaggaagtcatacgacgctgtcttagaggtgtagtagcctgacgcgaggttgctcagcccgtcgaagtgatcgaaccaatagacgccgatagtagtcgcatagtcaaaggctgcatcgcctttctcatcgcgcacgttagcagggcggacctggaacgtgatctccgaatactcatctgggttcgagtacagagtctcgaaagacttgaacgcgaacttgccgtcatgggtctgatagaacgcgtagtcagcagcattgtctttggtgctggtctgtagcagccagctcatcgcatagaatggcgtccacccagggatgaccacgctcatcacgttgtcagagtcatctacaacgagcgtcttaccgaacgcttcctgcacaatgttctttgcaatgtcgctggtcttcttacctgggtacgacttgtagatgcgcttggtctggttgatcaagaaggcttcatcggcagcatagacagaatactcaagcgtgccctgctgccctacgactttgtccgccaccttgtagatgacaaattcccactcctgctcaccatcacctacgctgtcattctcagactcaatctccaccttcaccttagtacccgaacggataggcaaagtcatgaggaggttagcagtgtccagcatgttgatgatgcaggtagtggtaggtgagaagatttcctggaagacatgcacactcacgaccgccgcggtaacgtctttatcgcccatggtgacggtaaacttcttcaggtcaccgaaattagcacttgcctggcctgttgccattagatcttgccttcaatgctcttgttgaacaggtcaacgaattggttgatgtatcgtggtgcgatgatcttgatctttccgcgcttgcggttctcttctgactcatactcaagcgctgtcactggatggatgttagccgggataggctgaccgtctgcgataaggtcacggatgttcttctcagcaacgtcgtcgaggcggaatcctgtggtgaggtcggtgaagaacagaatggtatgtaggctaccatggcgagcgacgataaactcctcgaggacgtcatcgctcattggccaatcgagcagcggattgaccatcccattgacgaggaagaagacccactcaagagttgggtccttgtaaagctcatgcgccaagctcatcgaagtagcgcccactggtacgtcgtatgattggtagacgtatgccttatcgacgttgatgcgcttgaggatagcagcgcagacgatattcatcgcctccttgctgtatccgtcaatggagtaggtgatggtcggaaactttctgaagaacgaaggcatcagtagccctccttgatgtcttcgcgtgtgacgatctcgagctctttccacttggtcgacatagtgatctcggacgggaagccattgcgcatcgttgagaacatgccctgtccagtgtagtcaatgtcaatggtagtgcagaccgctcgcttgaacttctgaatccactcgttgtccttgccattccagaggtagcgaatctcgcactcagaagggaagccgagcagcgccttgttattgccagagccgaacatgtctttggcatacgacggcagcgcattctcacggaagaccgagatgatgtcgtagatcatctggcaatctgcttcctcaaacgggtagaacttgaacacgaatgcaaactcgcgcagaccgacagcacggaacagcgcagtaacgtatgggttaggcacaacgccacctaccgcgcccatcagtccttcagcggtgacattaccacccataagccctgctgcggctgacccgaggttagcgagtccgtatgctgcacccagacctgcgccatcgcctacacgctcaagcacaccgttcataccattgatgtcaccgttgagaccgtcaacaatagacttaccaatgaagccgaggttagattcaccccagtccacagtagacggctgcgtgacagactcaggcatgtagaggtggaccgtgttcagcggtgcgctgttagtcgggctcttgcgctcaaagaacttgaactcaatgcaggcagggtgaactgtctgatcactgaggtcaggtggatagctatagagttgcttgtttgatctctggcgtgccatcggtgtctaaatagaaagggtctatcattatttaccggcgggttctatggcacgaaaaacatccaaggtcgtcaagaaggacgagccaccaaagaagaagcgtgggcgtaattaccaacaaggtcgctatcgcctgatccatccgcagaagtatgtcggcaacgcgactgacatcgtgtatcgcagctcttgggagctacgcttcaaccgctggtgtgacatgaatccatcggtggtgaagtggaacagtgaagagatcattatcccttactggtcagaagtcgatcagaagatgcgccgctactttgttgactacattgtgcagctcaagacagccgatggaaacatccgaacgctgttgattgagatcaagccagcatctcagaaggtgaagccaaagcctcacggcaacaagaagcctgagaattatctggctgagatggagacgtggcaggttaaccaagacaagtggaaggcggcaacagaatgggcagctaaacacggtatggaattcatcgtgatggatgagtacgacttgggcatcaagaggcgcggttaaatattcgcatggcattcaagaaaagcacacatcacaacgctacccgtcgcaccattgaggacactctcattctggtggaccgtaagcgtacgcgcaaagcgattgaatggttctacaacatggcagcctccaagctcaagcgaggaaaggtgcccgaggaagcattcggcgtcaagcgaaacaacaatgtcttcatcggtggtatgttcatctatacctacgacccgaagcacaaagacacactaccatggtacgacacgctaccatgtgtcatcccagttgagttgtatgaggacggttggctcggtttgaacctccattacctgccgcctatgatgcgcgcgaagctcatggacaagctgatcgagtaccgcaagcgttccgcgactgaccgcgcctacatgaaggtgtcgtatcgtctgcttaaggctgcgatcaagacaaagctgttcgcaccatgtgttcaccgttaccttgcttctcatgtcacatcgcgcctcatccaggtgagcgatgagtactgggaagacgttgccatgctgcctctgcagcagttcgagaagaagtcagcccgcgcagtttggcgcgcaacaggatccgcatgagcgctaacgaaaccctctacttgaagttcctctctcacttccagcgcggagtgatgagacctaacaagtaccttgtgaagttcaatctcccagacggcgtgaacggtagttcgacgtttgttgactcgcgtgtccgcaaggggcgcatccagctcgaggaagctcgattcaacggcatcggtagcatcaacatcaagtgtcacactgctaacttcccgcagcgtaacctgatcacctcggagcgtgcgcagaactcatctgcattccgcgtcccgtactcgcaggcgtatgacccggtcaccttctccttctactcagatgcagacggcgacacgcgccgctacttcgacatctggcagaacgcggtcatcaacatccgctccaacacgctaaacttctacaacgagttcacatcgaacatcgagatgtggaacctcaatgagatggacgagccgacatacggcgtccgccttgaggaggcatacccgattgcggttggtgcagtcgatattgcgtatgcgaacgcgggcacattccagaccatcaccaccacgatgcagtaccgcaggtgggtccagatcgggaccagcgcggaccgccagagagcccaaaacagtggtaccaatttgggtgggtgagccagcccggcttctgaaaggctagtagaatcaaggggttacgtgggaccccttcagggcaaaaaccctagtaaaatcaggcacttacgttttctgatctgaaatctgaccccaaacggtggtctcagccctacaggtgttagcataggggtgcagggcagagaggtcctgcagaaaagttcgttgtcaacctggggatcacgactatgagcagtctgctcgatgagtacctggcagctcgcaaagtgttctgcgaaaagaaactggacttagaggatgcactccagccattgatcaaatcgaaggtgactcacatccaaggtgagatatacttcgacatcaagaactgggaagaggatcggttagtagtgttcgtcagtgatacgaagtttactgatccgcgccatgtcttcttgacgcgctccgaggtagaagacgcaatcgcaacccgtcactaaaccaaagcccgccctagcccggcgggctttttcacatgctaaatatctcaccaatgtagatgtgatgtgagatatggcagcgaagaaaaaggaagccgtcaagtacgatccgtggatgttccgcggcgagccgttcgtcggcggcatggaagatgagtatgcggggttcgtctatctgatcacgatgcctgacggtcgcaagtatgtcggtaagaagttcttcacagggatgcgcaagcagaaggggaagaagcgcagggcaaaggtgacgagtgattgggagaagtatttctcatcgtccgactacatcaaagcctacgtcaaggagcacgggcccgcgggcatcaagcgcgagatcatctccttgcatgagctaaagcgcgatgtgaacttcaccgaggtacgccttcagttccagtataacgtcctcgacgcgcttgatgagaacggcaaccgcatctggatcaatgagaacatccaaggcaagtacttccctggactggtcattggttggcgtgaccgaagcgaattagacgctgagaaaatctgacgcagaaaagcccaggcgatgaacctgggctttgtcttatgctacggggaagagtagatgcgacgtcaccgaagcggtgttggcgtgatcgtcgagtggacacggcttaccgtagaggtagcgcgtcactgtgatgtccttgagcgtgaccctcgccttaccgatatggcaggcgatgccgaccgttgtcttgctccagcctccgtcccggctgctgtatccgtatttggcaccgatcacaatcggttgaccaagcgcgtcagtttgcatttgcaacctccatcctctttgccttgatggcctccccgatctcaggacccttcagggttgcctgctgctcttcggttaggtcggtgaagccgatgttccgtgtcttgtcccatacatcgacgaccttccacatcctgtactcgccgcgctcgtcgtttgccaagcacatgtcttgggtaaactcaaggaacagtgcctgatcgcggtaggcgcccatagcatagagtcgggctacctgactcgggtgctcatctcggaaggaagagtacatcatgcgatagcggcgccagtcaaccgagatgttgaactccttctcgaaggcttcgatgttgacgaaggccatagctagacgcgcatactttagtttgacagactgtgcgttatcgatgaggtaatagatagcgtccggcgacatccggaggtagcctttgaacacgacatcggtcgcgccaagcatcttgagggtcttgaaaaagtagtaggtgttcggctcatcgagcgccttctcgagctccttgatgaccctctccttggtcaggtcattcaatgcgccgtctgccaccatctgcttgcacatcttcatcgtacccggatggatcttccatgcaccgtatcttgctcgaaaacgagccagccgcagcacacgcaccgggtcctcagtaaacgccttcgacacatgcttcagcacatgctgtttgatatcgctcacgccgttatagggatcaatgatgttgccatctgcatccatcgcaatggcattgatcgtgaggtctcgccgcttcaagtcctccttgagcgtgaccttcgggctgtggtcagtgatgaagccgttgtagcctttgccgttcttgcgctcggtgcgtgccagcgcaaactccgtgccatccttgtccaggtagacggggaaatctgcgcccacctgcttgaagcccgctgcgatcatttcgtcgtgagtcgagcccacgaccacgtagtcgatatctttcgactccacacccatcagcatatcgcggactgcgccacctaccttgtaaacttgcatcgtattctccctcacttatgcgaccatgatacaggaaagatatttcactgtggaaatctgacgcaggaaagcccggctcatcaccgggctttcctttggtacgacttagtggatcgagtcgccgttccgtgccttccgacggacagccttcttggcggcgcccttcttggcggctgtcttgcgacctgccgccttcttggcggcaccgccgccacgccgcccaccgcgctgctcgcgttcctgctgagccgatgcgcgccgctgacgggtcggggcctcttcaccagcctgttcggcgcgcttcacacgcccgacgaacaccgggaagaagcgcccgtcggaccccttcgcgatcacgaagcggacgagcttgccattcggtgcagcctggcgctccacggcgcggacgacacgcgactgggtggaataggtgcgggcgggcttgacatcgttggtgctgaccatggtctgaatcctctgttgggccagtgttagggagaatttcgactggcaaaggaatggtacagaaccagatgttaagagcgcgtgtgtaccgagatttgacctccttttgttactggatgctgaggtatgacccagcatgaatgaggagctcgcggtattcgatcacgttgccataactgtccaccttcctggacatgtagacgctgtcctcactgaagacaaagcactggcgcgtctcaccgccctcgaacgtcttggtctgccagctacctgccacgttgctcatcatctggcctgcaacgtcggcacccatccgcatgatgagcatgcctttgaactcaggcggaccgcggtaggtgtacagcgcgcccggaggcggtgagggcagagctttcttcttgggcgggaagggccacattacttcttctccggttgcgccatgaagaagcgcgcagtcgatgggttgtgggtagcaccgctggaaggcttcggctcgcgttcggtagcgccgatcagtgtgaccgacgctccgtagttaccgcgctgtgccttctgcagaagctccgagaggcgaatgatgtgctccaggagctcctgctcgtcgttgaagacgatctgcacgcctgcggtattcggcgggaagaggatcatgcccgaagatcctcttccaggtagaagcccttcatcaggtacacggtcaccgaaccgtcgatggaagtgtacgtgcagtcctcggtcacgcgaatgaccagtctgccgtcctcgaagtcttcggtggccttaccctgccgcatgagggcattgactgcggtgtgatccagcgcaccgagcaggatgatcgcgccagcggtgatggtcgtcgtcttgatgatccacttcatcacacattctccatttgagtagcgacagcctcgaggagctcttgctcggtgtcgaagctgtcggggtcgagtttgagcgagacagcgatgccccggacggctaccatgtccagactatacagccaggggcggaggtcaggggcagtcacagtcgtcatgttcagtccttcgcgagcacatggcccttggtattctggatgaggtcttcgcgggcatcgacgatcaccacgcgctcctcggtgcgcttaccatcgaccgtgtagaactccggctggtagtagttgatagtgtaggtcgcggacttgggcttctcgatcttgcaggaccagcagtagagcccgccattcgacttcacgttccgcttgatgaagtcgtcacctgcgatgcgggcggcattcgcgatagcctcggcgcgcgtgttccccgtcgcccacgagactgctgtggtggcgtagaagtggtggccctgttccggggcgcggtgcgggacgactttggctgttgccttctggatgcccataccagtatcagcatacttgtcgatgacctgctgcgcggctttgcgcgtcgggtacaccttgacgcgctcggggagaccggcaatgcgaaggtcggcggtcaggaggccagctggaattttgatagcgaacatgttgttctcctcagtccatacagtggcgggtgttgtaaacgtcgctgctcgggtcgctgcaggcaggatccttggtgacatacagaccgacgaggcagaggatcgctgcgatgacgagcaggatgttgacggtgcgcttcttcatgttgacctcagagcttgatgttggaaatctgttcggcggcagcttcgatcacaatcgcgcgcatcgccgcttcggtgagattgtagaacgaagcggtgtagcgcttcatccagccctcgcgacagcgaacatggtgcgacggggcgatgccgaacacaccgcggaactcgctggcgcgattgcacagaccgttgttatagaggtcatagtagcaattcgaagccttgcggaacttctcgagcgccttgttcttcttgccagcgatggcgccctccacgggaaccagcttttgcagcgcgtttgcgagcggcgtcaggtcggaattggcgttccagaacgacttggtcggcgtgatatccatgtgcgttctccttaggcgacgacgttgaagtggaagtggatgccagcctgcaccgacaccataccgaggaagaccgggaagaaacgtccgtcggtgtgctcggcgatgaagtaacgaatgagctggccctggaactcctccggaagattcttcttctcgacagccttgatcgcgttctcgcgggaggcgtaggtcttgacgggttccagggtgatgagcttggccatttcgtttctcctgtcagttctgggcgctgctgcccacaaccacatagtacgggaattttgcccgagaaacaatcttacgaatcagacacttagcaaccaaactcagaaataggccagaaatcggtggaaattttccttagtaatatcagatagttacgaaaaagcccctggaacctagtagctccaagggcttttcgtcagtgctttcggctgtcagtgatgcaggctagcgccctgccgaacaggcgtgagattgccatcaatgaacacgtatgccttgctatcgtttgcgttcacttcgcgatacacgccttggatgatgttcgatccattaggcgcataagatggtccacctgccagtcgccatcctctctcaaggcggcggttgacgagcgctgcgagctttttcgcagacgtcgcctctacaatgtcaaattcctgctgcatttgtttcctctgtaagcatatcttcaatctggatcatcgcgatctgttcgatgtctaggtgcatgagaataggacctttagcgtcctcgttatatgcccattccatcgagcgaatgtcactaccaacgtgcttccagtcgaacttcttgaggttgttcagcacgatgggattgctgttccccttcatcgttaggatgacacgaaggcggacagttgtttcgttactcatcttcaccaccacggaagttagggttgccaatcgaacgcagggagaacttgctcaggtggcgctgtcgataaaagtctcggacagcttcatcagagttttcgtgaccgcgtgctgcacggttgacgaacttcgcgagctcgcccgtgtttgccgaaacccagtcggcacgttccttcccgagcgggaattcctgcgcgaggtcactgtagagcttgatgttggaaacgatcgctgcaatttcatctgccacctgttgttcgatctggcggattgcatccatatccgcctctgcctcgatgaggttcgggatcatgtcgtcgagcttctcctcgagcgcgagcagcgcgatatcacgaacacgaatgtcgatcagaccgtggcgatccatgtaccacttcgtcttgatcttgtagcgtccctgcgtggtatagaccacccagccttcgatgccctcgaccgtctttgctagttcgaggagctcaccgacagtttgtgtctcttcgtagtctgtgcactcgacccggttgatctcaaactcgtcagcgtagaacgcaaccgtagtgtagtcagcatagctgccatccttcatgttgcggagcgcgagcagagtgaagtcggcgttgggaccgtagtcgatcacgatcttctgatctggtgatgtgtactcgaagatcggagtgaatcccatcttgagcatctcacggcagaagcgctcgagagtcgggcccatcgccttgttagcggcaagcgcaacatctgacacgaacgacttctttgtcttgagaaagatagagccgttgatcagcgcaggcgtgatcatgctgccatccatcttatcgaggataaagcggatctcgtggttagcgacgacgtacgactgcgtccacgccttctcgttcacgttgaagaacttctcgaacggaagtgagagcagctcgccagtcacagcgttgaacgtcggtccgcgagtctcggttccgttgtgcttcgcccagagctcgtcgttggacagcatgtaagcgatgatcacgacgtctacgccgttgacagtctcctcacggaaacgaacggtcgggtcatcgcggaggtggtcaaagtcactgagatggaggtacatgatatttctcgaaagagtggttactgctgctcaatcacatgctacagatcagacgtgaaagaacaattcgcttcttcgccgttcacaaagaactgcgccgagtcaacccggcgcataacatctcgaagtttctcacccgtcagcggcaagatgccgctccctgcctcccaacgtatctcagaagcgaccgtgtgaccgttcacaacaaagacagcagtatcagggaatgacgagtagatcatttcaagctccgactaatttcgaggacgttcgtagtagaagatgtgagcgccaacgcgaacgatacgctcaatgcgtcttgcccaagagggacggaccgcagtggtgtggaagtgcgtagcattaccgacaattctttcaagcgtaccgtcaaacaccatgcgagcgatcttcccggcagcttcccatgctgcaagatcgttcacacggcgaggagctgcctttttctgacacacccatgagaattgacagacgcccttgtgacgctgcttcaccacaccgcatacggtgttcgggaagcgaggatcattggcgcggtttagcgtcacctcagctaccgcctgcatacctcgcgcaccttcgccgcgtgcttcgtagtagatgttctgctgcatacagcgaaggtcttcgtccctcggcagtggtgcaatagtaatttcgggatcagaaatatcgactggcgttgtcacagactctgttggcgcagaggtatcttcaatagccagtacgactggtgcgagctcaatctgctcgatggctggaacttcaatgttagcgttgggttctgtcgatagtgcgtcgtttgcgaaagtgttgaatgaaagtgaaagcgacagaaccaaggttagaaatttcttcataacttggtctccttacgtgcggagattgtaacagactaatctgtcaaatcaaaagcacctcaggttggtttctaagaaggcatggttgtggtgtagcgacagaaatttctgtcaaacaaccgccttaggcgaatagggcagcgatctgtgcccaggtggcgacgtcgttgtacgactcaaggtcttcgttgaagtggccagatggaatcttggcacgaagtgcttcatagacagcgtggtagttagcatatccaatctcatctgagtcatgcagagcacgaatcagagcgcccatcacatcatacttgactgcctctgggtgcataggcgagcaaggtgtttcatctaccttacgagcaatcgcgccctgtgtccagcctgtgccagagttgaggagcgcgagcgtcgcggctttgagtgtttctacagacatggtttatcccttcaatgattcaaagagcgtccacgcacgctgagtagctgcgacgcgctccttgtatccgttgagaccaccgttaatcttcttggtgacctgctcaaacgcattagcatcagccaatgggttgagattacgcgatgaccagaaccatcctgcagacagtgctgcatctggtagtcgctccaatagggacgagtccctgacgatacgatcgtcgccatacattgccatcgagtaggcggtgtagttggcacgacctgtgagctgcttcagtcctcgaccgatgaacgcccagccatcatttggatggacgttgccgaggttacgtgcgccaaacgctccgccgtagaggatgttagcgagcatctgttggttagcaggatgcttaccaggcgcacgtccgaatttcatagcatcagatgcagtgatgcgtgtacggctgaaagtcctcaggagaccttcaacagaatagttaagcgactcgcgcaccgacttgaagcccgcagactcgacaaagatctgtccgaggaagtgggacttctggttctgggtgacgatgccaaacttgacacacgcctgctcaagtgccttagcgatctccgccgaggcacccatcttcattgctacgatttctacgctcatttcttactcttccaaaatctcgaggacctcaagaacggataggtcggatgcggtgagagcgatggtctcaatgtcatccagcttgatcttgcttggcagctcaatttcgatgtcgtggagctcttccatttctttaacaagggctggcatgttctcatcttcgaccttcacgttgccgctctcgtctacgataagctcgcctgcctcatcggtgttgccatgcttcttgataactgccatgcggagggtctgatacttctcagcctcctcgcccagcaccttctggatcttgctcagacgatatgcgaccttgactggcagcggtgcattgaagatcttgttgagcagttcaaagatggctgggttctggaatgcggcaaacttcattgggtatctcctgacgaatcattacgttgtcctgtatttaaccggctactggaccttcgggagtaggcgacggctcaggctgcgtctcatcaggtggcggcaggttaggtgtcggctcagtaggggtcgggtttgcagctgcctcatctgctgcaatttgagcggcgagcagctcgttgaacttgcgatcaaacactgccttcaccgcgcctacaacaataccacctgggaccggatacaggcttccatctggtagctctacctcaatggtgcttccgagcacctcagcaagagagatacgaaccattggtgcgcccgttactccacgaagtcgcgtgtgagggaacatgccaaccttgacgccgttctccataacaaggtcgacgacgctatattcgaccatgccgtctgtagtgcctgggtcccaggtgattgtgatatgaggagagactgcttctcgaacacggaagatgttttcctcagtacggattcggtctgttggtctgatctgtgtcatagtgtttccttaaactgggacgccgcgttcgacggataggtagatagatgcagtatcaagctggacttgatcagatgctcggcggaaggtgacaccgaatgtgacctctcgcgtaccgttgacgtttgtactcagtgtccaagaacgcgacgttcctagattgagccatgtgtcaaacgtgccagcggtgccgagggttgcgctgcgtgtgacatatacatcaacctctgatgcgctgcctgcagtgagccatgtgcctgatccaccgcagctccaagtgccagtattgtttaggtagaacccagctgttgcagtgcctgtacctgagtagccatattcgctagcgttaggcatgttaacagttggacctgtcaccttagacgctccgtagaaatggtacagaccgatttgtccagacgttggtacattgacattggcggctgtattaggaacgtatgttccaccgcggtaatagttgtacaggttcagacctcccccaaactcattatggaggtcctgcaagctgatctgtccagatgtctgtagaggcattagtttgactccagccgcgcgacctttgcttctagctcagcaatgcgtcgcgcttgatccttgacaatgaggtcgaggttcttcaccttaccgatcacaagcgggatcgtcttgtcccacatgatggtcaggtagtcttgcttctttcccttaatcgggttgagcgtcgagttgacgatgacagcctcagggcaagcgagctgcatctcttgagcgatggcaccaaggacgtcggtcttgttaaagccaagctcattacctgtcttgttccaatcgaagagtgccagcttaatcttgtcgaacgcttcgtctactgaggaggagatttcgtcattgtagtaacgaacattagtcttgagtcgcgcgtcagatgcaccaccgtagatgttgccagtacaaccccagttgttagatgcatcgcggtaagcacaccatgcgtatgcgttgttcgcaaggaaaccgatctggttcgagttgcagtggatccaagtcgtagtggcttggtcactgtcgtagaactcgattgtgggggcagtactttcgagtcggaaacccgacgcccaaagcggcttgttgtagatcttaacgtagttggagtcattcatccagatgccgccaccatacgtttggttgtaccaaccacaagcattgtagcttcggaaccaagcagatgggtagttgtggacaccgtttgtatcgaatgtgattgcgttagatgtactaccagagaaccggaagccccaagacgtcgcctccataatgatcggcttgtaagccgcagttgagtagttataagctaccaatgcgccatagtcgccagcaacagacgacatgtagtacatttggatagatgcaccgcccggattgccaggattagttgcgccggagtcagtagcaaagacgcgaccgtagaactggcctcgaccagcagtgatgaaatgtccactcgcgtcgagatgtgcaagtgaagtaccacctgatccagcagtttgtgctgtatcactatgggtaccattcttgtgccaggagaagccactacccgaacggaagtacagcgtgttgctttggacgccaataccgtagcttgttccccataggtcaatcatctgacgtgtttgggaaccaaacgtaatcttacgagtggtaggaatagctacgtcagcaccgccgtggaagacagcattgctgttgtatgtcaggccattgagagtagcagcgcctactcgtagctgcgcgccaccattaagagcaaagatctcaatgaagccgtcagaccagcggttggctagccatgcgtgatggtcagtggcattgctgtagcccgcgccaatctctagattgacagttgtgttgttattgtcgtagagacgatagtacttgccgttgccacgaaggacaaagttggtacctgcagtaatttcacccgaggctgtaatgctcgacggtgtaatggcacccagggtcaatgtgatagcaggcgttgtagtcgcagttgcgactgtaccggagattccattcgctgcaacaacgcttacacttgttactgttccgctgccacccgctgttgcagacagtacattgcctgacagagtgagacccgaaccgaatgtaaggttaccaccgtgccagactgtgttgccgttgcttgtcagtccgccaattgcattgagcacacccgattcattgattgagactacatcgccgacgccagagacgttgaggtagacatagttcgacgttgcgtaccagccatagctgcgtgcagtacccgaacggttggcaaagaaaaatcctgcacctgcacctgttgatgtcaggctaccagcaattgtggcgttaccggtaaatgctggcgacgctagtggcgcgtagcttcccagggcattagttacaaaggcggtacttgcagcaaacgtagtgctatcgcccgcagtacgagtcgtaactgctgcgccgttgatcattgtaacaacgccgtttgcacggttaatgctgagtggagcatcaatgcccacccctgcatcatcaaagcggttgattacgaagtttgagccagcgttagaaccgctctctgcgccaccgtcagccccccaatcccatcgagacgatgtccctgtgcgagcgcccatacggcgcgctgtaccggcagcacctgtgatatagccgttgtgaggctgaacaaggataccactcgcaatcgtcacgttgccggttagcgtgtgggcacctgccccagaaatctcataacgagtaattgaagcagtacgcagacggatagcgcccgcttcttgtgtagttacgtcgaggtatcctgtgccacggtgcaatagctgagtagtagcattctcaccggtgtttccacggataagacgcgcgccatagtcagtgtaggtgagatcgccaacaagatcgatataggatgagccattacctgttctgctgccgccgacctcaaagccacggtcgcctgatgcaatagcgagaacaaaattgctccagatggtgttggtgaatgttccgtcaccgcgaagcagcgttgtattatcgcgtgtgcctgtaccgagataggtaggactgatcagcgcgccgttccatgtacctgtggtgattatgcccagcgtcgtgatgccggtcgagccagcccatgagtttgagatagacaggttgatggagtctgtgcctgacccagttacgtgacctgtgaaagtcagtggcggcttgatcaggcttgatagtacgacgtctgccatgcggcttgttgccctttatcggtagaacggaatgtagatatcctgaggggtgacgcgccaagagtcctttcgtacaagtgggtagcccgcttgctcgaacgaccatgcgacaagctcagaacatgtccacttgtcttggctgtgccagtcgcgatgacgagcaacaatgccgaagatgccgccgtagtcgtagcccttaccaacctggctgcgagcagcatcgaggactgcatcggcttcctcttcaagcatcatcacgtcaatgacgtcgtatttagatgcctttgcgatgaaagtttcaagcggcgtgcgcactacgccctcaaacgcagcagcctcgatgacttcgttgccatcgatgatgccacagtgggaccattgcgaccagagcgctgttcttagtgcaacgcttcccacgccatggctgcggcggaagatgatggagactttcttcatgggatgtacctctcgatgtcttgtactggcgaatctagaatctgtagagctcgtcctgcgccaattagaccgaacagctcaagttgctgaaccccgccgcgcgtgtctgctctgtcgaggtcaatgaatgtagcgttgtttacctgagtgtgcatgtctcgcaagcttgcggcttggacgcgacggtccataaagtcctctggtagctctccatccatctggacaggtcgctcagacgcgagatcaatcttgacacgttccgcttgcgtaaagcgattccagaacgcaaggcgtgtgatcttcttgggctcagaatagatagcttctgctggagggaagaagacaccctcgctatccatcgtccacccgggcgccgggcgcggctgaacatcgctaatgtcaattgcattaggccaatcgcttgcaacgatgacattctcaatggttgttccgtctgaagctaaaacagcaaagatctttgacattatgcgacctcaacaaattcgagcattacaaacccaggagcgcctgctccggatgatgtagaaacgcctgtggagaaagaagaaccaccggcgccgccgccaccatatccgtatcctggagctgcgccatcaactcgggctgacatcatagagataccagcacctccagtcccgaacatggaatacccgcctgcaccatatccagttgcacccgattggtttccgctggcaccgtgcgacccttgaccgagacttgctgcacctgcagcttgtgactgtcccgatgccgtcgatccaaacggagcagtaacattgttcagtcccgagactgagaaccacgaggcatcaccaattgtagcaataccgcctgtaccagaacctgatccgctaatgccaccatttccgcctcgcaagtacagaattgtactgccgacctgcacagtagtactgcctccgacatttcctgacagggatgttgtagttgaaacagaagaaccgccagcacctacaacaacacttaaagttgtagtcccgttagggatatgaattggatggttcattgcgaatgcgccagcaccaccaccgccaccgcgcgcagtagtagagttagccacaccgcctgatccaccgccaccacagccagtgatgtaaactacgccctttcctccctgtgcccacgatggcactgggaccgacgcattggattctgtcagtaccaagacttctcgcttgggtacattggttcggaagctactaagttttgtatctggcatcagacgatctccaaagtgccggttgcgctagctactagataagcagtttcgcctgcatcgagtacaaggtcattccctgaagggacgcctcggaacgtattaccattcgcaacaagacgaaccccgttaacagttgcgtggactgtaatgaatttagtcgctgcaatcgaggcaggtagtgtcaagttgacagctgcagttacgatgtatgcgttatctaccgagatagactgcgctgtcgagatgacattccatttggttccagtgcttagcggcgtaccgttaatcgagaagccaaccgcagcatcaatgtaaccgttgtgctggatagtgccacgacgaacgccgcccgaaacgaactggagatttcctgcggtgttgcctgtcagtgcgttgtctgactcgtaaatcttccaaccgttaccgttgagccattcaattccttcattgatccctgggtcagcgaaggtcaggagattgacgttaacaatactgcggttgttgaggtcgaggcctgttgaagcagtagcaccacccgtgaaggtcagcttgcctgcaacagatgtatcgcctgtctttggaatgtagaggctgagatcagacgtgccaccgtacagaatttcaagtgaaccagctgccttagcaacgagcgtgaccgtgttgccgtcattgagtaggagatcgttacctgcgccaactgcatcaattgtgttgccattgctgacaatgcgaacctgaccacctgaggcgttgacagtgattgtgaagccaagcggagcagatgcagggagtgtgatggtacgaagcgtcccgccagtctccatgatgtagccagtcttggtcactgctgggtttacgtttgcggacgaaattgtcgtccatgtaaacccgccacctgtcaccgaaagaagaccggtcgtgttgttgtaatctagtcctgttccgaagctgaggttgccaccgtggtagacaccgtcgcctttgtaggagatttcgttctcatccacgtacagaacttcggaaccgttctggaacagggtgagcgtgatagcagttaggttacctgcggtcgtaaggttggtactgcccgtccatgttgacagggcagtattttcaacattcccgatgttcaggaaggtacgaacttccggcgccagtgctttctgcgcctcgttgttcgcacctagccagagtaggttagtcgccattcgatatccttagaggattacgacgcgctggatgctcagtaccatcttggttgtcgagattgcgataccaattggtgccaagacaccagtggtcggagccgtggtggtcagcgcacctgctgtggtgttggacaagtagtagcgagcacctgttgtcaagccacccgactgtcctgttacaacgtcccactgggtagttgtcgcggtgacaacgccagagactgctacgttgcccgctgcaccattggcgaccgaagtgctagtgacgataccaattgcaacagatgtcgcgtatgcgtttgcgttagcgaggttgaaggtgtttgcaccggagcagtaaacaacacgtccgatcactactgcgccagcgttgccgttggtcatcgaagtaacgatttgatccgtcgcgttaaccgtaccacctgtgacgcgaccgtaagtgtcgaccgtaacgctgttataggtgcccggtgttgccatcactcccgaggtcagcgcaatagtcggattacctgagacgccgttgccgtttgtgacggtgataccggtaccagctgtgattgtacgagcggtgaaggtatccgcggcggtctgcaccatgataccgttagtgttgaaaccagagagcgcagtaagtgtagcgtccacaggctgtgcaccaatgtcagctggagtagcagtagcgcctgccgtcacgcgcccgtaggtatcgacagtaaccttggtgtaggtgccggcggctacaatacctgatgcaagaccaacgcccgagccagtgactgcaatctgtccagcaacgccaacaaccgcgaaggtgttaccagtgagcgaaaggccattacccgccgaataagacgctgcacctgatacctgagtgaacgtgatcgaatcggtgccaatggttgggctagctgccgaggaaactgcccagccagagttagcatacaatgcaccctgctggacaaagacctgacgagccggcgtgaactcgccgctagtgtcggcgtctgttgcgcgagttagtgcaaccgccgaaccattgaagatgtagataccgttctggctatcagtagtctgctgggcaacaaggagtcgttcgccgttagccagtgtcacgccgtcgaagactgctgtgcctgggttggagattgtgatgttacctgtggtgcgagccttaactgcggcaaacggcgcaataccaccagacgagaacaggttgtcaacgtactggcgagtggtcgcgtgcatcgcattggtcggatccgcgtgcagggtcaagaacccagtcatcgtgtcgccgttcgtgttcaagtacgtaccgtcaaccagcgcagtgatgtccgccgcagcgacgtttacagtaccagtgacacgaccataggcgtcaacggtgaccttcttgaatgtacctgtgccagagtcggtgacagtggcaaggtcaacggttgggttgcctgcggttcctgagccattcgtgatcgcaatgcgcgccgacgatgcagttgcaagcgtacggacaacccagtcgcctgcaccgtcctgaacaaggatacctgcgcctgcagctgcgactaggttggtcagcttgtcgctgtacccttgaacgtctgtaccaatagcaacgccgaggttcgtacgagcacctgcggcggtgcccgcgcctgtaccaccaagcgcaacgcctagtgtatcgccattctgaaagcgagatagctcattgttagagccaatctttagcggggttacgtcagccattgcttgtccttcttatagtttgatcgacaggtcgaggtcaatcaggaattctgagttatttagagcatacccgatcttgaccaggtagtgcgggaattctgttggcgctgtgacgctgatcttagagtcagcattcacatagtagttcatgccagtagacagcccgcctacctcaccagacactaggtcccaattctccggcgacattaccatcaagccggactgctgaatcttgagttgctcgcctggcgaagatgcttcgactgcaattccgaggcactggtgtcgaggtgcagttgaacgtgcgcggagataagattctccgaccttacagacaggcgtacctggcaagaatacttcgccgccggtgttggtcacatgtaggtaagtgttgctcgatccgccgcctccgccagaaccaatctggttgtagaggtcgttgagcgtagcctggagacctggcacgtttgcaattggcacagtctcagcagtgtccaccttgccgtcatagttcttgtcgtagacggcgcgcatcatatcacctgcgccttctactggaatgacgatcggcggctcctgcggattagggcgaagcggaaggaagtcactcgaggaagaatcctgcttgtagtcgatcttgaccgtcggcgagacgaattttccgatgactagcttactcattagtcgagtaccacttcaagagatgcgtcagtgaaagcaggaacagttgctgtcgtgccccacttgagcaggaagatattagcgttgatgctgtaggtgatctcaaatccagcatcctcgaggacctggaaggtcggcgcgaacaagttctggatagcaggcgccggcacgctcgggaagccgaattgcagctgggtgttaccgagggtcgccgctgccttgatctccttgctgagcttcgactggagtgtcgcatcagactcagtacggaggtcagtgccgttggtcatgcacagatagaggatgccagcacggaagccaatgcccaggttagggatcatctcagggatcgacctagtgatctcgcgcatttctagccacgacatgttcggatggtcccaggagatcttgagcttgccgttctcaccatcatacgaacaaacgaatccgcgcatcgtgtaatgctggatcagcttgtagacgaggtcaggtaccagatacatctcctcgaatgttggagcgtcagcgaggtaatggaacttgaaggcaaccgcagcgtcacggatagcttgatcgagcgcaaaagtctgaccgtcaaagttatccgttactgttgggagttcaattagtgtttccatgcgctattagacctcaaagaaccatgagttcgaatcgagtaggaaggcgcgcatcatagcgttagcggggaggctgtaagttgtaacagtcgaggcacttcctgcgaccttagcatcttcaccggcggtgaggttgatcgtcgttgcgcctgtggacatgttcacgatcgtgaacacatttgcggttgttacgtttgcagcgttgagcgtcagcgtgagaccgttcgcagtaacaatcaagcgacgatcagcgtgagatgcagcgagtgtcgtgttggcgcttagattctgagccgtcttagcagccgcaggaacctcaaggagggtcttagccgcagctacatcggttgcagtcaagagcgacttgccaacggtagtagcgtcagtaatgtcgtcggcgacgaacagcgccttgaagtatgctttgagagtggagagaagagcgccgcccgtcacacctgccttctgaagcaccagaatttccgtgcctgcgatggtggtgattggcgtacgcgcgaagatttggtcgagattaatcaaggccattgtcctaacaggtcggttcattgatatttatgcgtcacggctttactactgcccagacactaaataccggcataagcctaaccataagaacaacaaccaatggactcagcatccgaaagcctactggctcaaattcttttgatcgtgcaggacgtccaggtgtcgctcgagagctttgaaaagcgtctcgatgaggcaaaggaatcgattgacagcttgaataagcgtatcgacgacgtgattgcagcaggatttcccagaggcgacctcaagggccaccgtttgtggcatgaggaacgagatcttccaatgtggaagcgcaccctgctcaagatgatcgtcggctaatggaaccaacaacaaccacactcgtaggcggaggagtactagcaggcattgcctcgctgggtgttttcctgcgtcgcctatcgagggacaagttggagctaacgagagaccgcgccgaggggaacctgatccaggatctcatcaagcaacgtgatgatgcacgcaaagagcgcgacaatatggaagccgagcttctgaagatcggcgaggaggcagaccagtgcctcgagaaagtaaaagagctactgtccaaagaacagcagctccgtattcagaacgcgatgttgtctcagctactagagcgcctcgcagctgccctcgatgcttcgaaggtagaacttcacgaggctttagctaaagcgaatcaatcccagattggttgagtcggcaccttactagtgtcgatgctactgtgcgagttgaaagattcatgtttgtgcataccgcagcactcgcattcgaggctgcggtaaatccagtagctggtcttgtagatgttaccaagctgagtcaggtagttgtggacttggtaccactcccgtgaccacttgccccacttgtgaatgccaatgcggcaaagaaatctcatagctgtgccttaagttcttcataggcgcgatcaaaagcgcgcaattcgtgatcccagtaggcgcggtcgtctacatcgcaccacacccttgctgtctccagcgcagaacgccatgcggcttcgtgcgtcaagaaatcgagcggtaccctcacagcctcgcgacggatctcatcgcggatctcttccagcaagcgaccgaggacgttcattcccttgccgtcgcatcgaccccagaacgtatcgccccaagtgttgccctcgacgagcacggcgtcacctgtcgcgagcagctgcctacgacatgcaccatccttgaacttggatcgcaggatgtcgcgcatcactgtgatcttaacagtctcccagtccgaacgcatttcgacctgacgtcccagacgcttcgcctgccctgcggtcagcttcggatcaagaaacttctcaaagtcctcgcgcttagcacacttggctgcctgataggcatgctcagaggtcttccacatctgcccttcatgcaggaagtacacctggtagaagttggacaggaacgcgtggtcaccattgaaccacgcgatttcgtcgcgtccgaagatgtcagacattagtcgccccagtcacattcgatgaagacaaagctaccaccaccgccagctaatgcgaggatgctgaccaagaagccaataccagcgccgatccatgctgctgggaagaacccagcgaggaacaatgcaccgaccactccgccgaggaagaatcccactacggtacagacaagcatgactaccaaaggcattactctttctccttgagcaggtattcagggctgatcgccttgaaagaatagacgcggctaccatgacggtcggtgaccttctctaccgacttgaacactaggccttcgcgagcgactggcgcgacctcagagagtccatttgccatctcgatgagagtctcgatgcgcgtatctccatcgatatggaatctcgcgatcatccgtgccaccttgacaatgctttgatcgacttccttggaaagatcgaggatgaagtcgaagcgttcgtcgggtgtcagatagctatcgttgagatagatatcgaagatgtggtattccagagcgggcaggttgtagatattgccctgaatgcctggaccgatgagctctcctcgaatagcaatccgcgaacctgggttgagctgcgcccaagcctcgagcacctcgaggatgccagaagccttcgcggtatccacgaaggaatttccttcctgatcgagcttgaggtcaatgttacgactcgtcacgccaaccgcttcgccgttgtggtaaacggtcatcgaagaaccttccagcttttcctctgcgtcataccagccgtgcggaatcttgttgaagcaattctgcacgcgctcctgatctgtcttcggcagccactcagggtagttgccgcggcacatgcctgcgagctgcgccggaatcggcttctcgtacttcttgactccgaacagatcagcgagatcctcttcgtcggtgcggaagtcgtagaactcgaacccatcctcaggattgcgctgcgggaagagagcgccaaacgtgccgtcagccatctgctcgcgatgagggaatcgatcgaggtcgtgaacaacatcgactccaaacggcagcggaatgatgaagccctgcgacacctgaccgcgcagcttgatcgtgcgcaggcgatgcccctcgagcagcgagccatcctcgacgggctgcatcttgcagctacgcgccatgaggaattcaaactcggctcgacccttcggcaggacgctgtcgatctcgaaatagacgaccacctgaccgacttcgaactcgcccttctttacaacgacattccagccgtcaacaaccgccacctcaatggcgtcggcgttcgggatgggattgatagctgcgatacgacgcagagtgaccagcttacgcattgaaattccttagcctttgagtgccttgatgatgtcttcgagcatagcgacggatgctgccttcgcttgcggatgtagcacgttcgactgaccgaggtcaatccatttctgagcgacgtctaggacgcgttgacggatcgcctcgagctcgcgaacctggacgagcgcattctggagcgactcgttggtgcgttgcagttgcttttgctccgcctggatatgcagcaggtactgcaaaccgtcctgatcgaggttgctactcattagtcgagtgccttcagaagagcgtcagtgtatgcagtgatgagcagcgattcactcagcgacatgctattgagaggccatcgtgccgccgcagcattttggtaggcctgcatcacagcgaggatgcgctttcgctccgccttgcggcgctcaatctcagcgcgcagctcatcaatttcgagacggtccttgatgtgctctttctcagcgatagagcgattgaaatatgtgtcgaggaaatcgaggtctgatctgttcatgccccacatgctaggcgagagcattttcgtgtcaagcaaaaggaagcaccggcagggcgccggtgctaagtgatcaggttgtccttgaaaaatcagaacggaggcgtggtccggtcaccccacttgggcttgatcttgtctgccatccacttctctttcagggtgaggcggtaagcctcatgcacgtcctcaatatccttgtgaggcgtacagttcacgaacggggtgcgctgcccttccgggatgcgcttcggcacgcgctcgagtaagagcccgaggtctttccaggtcttgtggaccttgcccgtgcgactggtgtactcagccgccatcgctgcgaacagacggtaggtccagttgtagttaccgactgacgaccgcacccaaatggctgcgggatgattgcggtgcgtgatctggtagatgatcttcgcacggctgcccatgcagatgcggtgggcggtggagaggagttgtcctgtttccaggatcatcttgttcagcctgcggtcatccaggtgcgtggcgcagaggatcgggctggaatgggtgacgaagatgttcatggctcactcggcgttccctaagcggatacgaactgcggctgcgccgacggtcatgccgggcagggcgatgtactggtacgcgttggggttggtcttctgttcctcctgggtctggatgacccgtgcgagcagctggcgggcgaatgcctcggcttcgtcgaggctcatgttgacgcgaatagtctggtgcatctcagttctccagaacgtgcttggcgagagcagtatcaaactcgacctgccgcccttcgaagatgaatccgcggatgacctcgcgctgctcgggtgcgtgcgcgtgccattctgctgtgcggagcaggatttcctcggcggtggctgcgcggatcatcacgccccttccatcgaggtaggtgtcccgaaggacgaagccgtggatggtgttctcgaccttggccagaatgtagccctcactggctgcctgccgctgcgccgagcacaggtgcaggtcacggtccggattgctctgcccgcgggcattgcaagtctgggtcgcgatgcggtcgagctccttgcccttctcgtgcagggcgcggaacttgtccgacgcgcacggaatgaggacttggacgttggggtttccccagtagggaccgagacggaacattgagcagccctcagacagagtagtaggatccgttctcgaaagcctcgagagcacggtcacgcgattcgcgcttccagctcgcagcctcgaacggggtcaggatggtgaagcggacgggaccttcagcatctgccaccacctcgtaataccgcttgaggtaggcatagacgctcgcttcgatctcgatcttcgtcgtccactcagcgcagtcgcagtcgcgctgccaaacctcgacgtggaccttgccgttgatcgaattctgcttgatgctgtcagcgatgcgagcgcggtcgttgatcgagcagtcgatgttggtgtggctagtctcggcagcgatgcgcatcatcttcatacgcgcaccgaaaccgattttgtggagaacagtaacatcgttgagggcggcacgcatggcggagacatttgagcggcgcatctgagttcttcctgtcacctgactgtgttcacagtgtacgggaatttcgtccgcgaaacaatcttacggatcagacacttagcaaccaaactcagatttcggtgtttctggcgcctcgggctggtctagtaaaatcaggcagttagtaaaaggccccaaaatccctgcggattctgaggccagaagtggcgcgatttggcgcagatcagttgtcagtagcaaaggccatgaattgtgggctcagtgacggcagcttcttctgcgggcagatcttctaacagcgaacagaggatgtcagcttcgcagttttcgatgttggctttacgcaaagcatcgacgaggatggcacgctgatcttcggagatggtgacggtgtagacttgcatcttgtttctcctggttggtccgccaatagtaacgaaatccgtacagccggacaacctagattcggagcaggtgcatcgtgatttcggacggcttcttgaagcgagtcgaacgacgtttctcccacttgcgatcgctcttgaaaaacacaccgccttccttgacataccatcctgcttgcctcttgcctcgccagaaggtgtagcgaattccagtcggggttcgtcgcgagcgatagaagactgcgcgtgagtagtcgatcttgtctactgggtagcaatcctctgtgcagaagttgcaacgcaagtcgcggtaaaggtgctgccataacgcaccatgctctgtggtgtcgttagcaacatcggggtcgaagaaaggttgtacgattagtcggtactttttgcactccacaagggtgtgcgcgagctcgtgcgcgatcagccatgcagtccactgcttccaattggcatagccatcgccgatgccttctttgtcacgcaggaactcgtattcctcgtaagagaacttctcggtctgaccgacgttagagcaaatctcaagagctgccagcgagatataagggcgaccgctatcaagcgagccgccccatgatgctgctgcattagtacggaaattgaaatagagcttggggttgtatcgcccaagcccgtatttctttctcaggtacttccgttggcgctcgatctcctcatgggagaattgttcaaaagccttccgttgatccggatgggctgggacaaacgacgccataacacaccactaatcaagctcgacgatagctcgcgatatcgacgaacaggtcctcattgtcttcacggtgaccacggcgcattgccatgttcttctctgtctcgcgtacttggacacacgagcaccacacatcttcgggtgcgcccagctcgcggaggaagcctgtgttgatccatttgtagatgaagtctgcgagtgcttcacagcctgtcgcctcgacctcagtgatcttcatcaaccccagctcaccgagcttcttgatctcgttgtagtacggctcgtcctgcgcgaggagatagcagtggtcgaaccaatcttccagctgctccttgagcggacggagcccaccataatcgacgacccagttacgggcgtcgagactgtcgcactcgaactcgaagtagaacgaaagcgcgtatccgtggatcagattgcagttaccattgtcgcgccactgtcggtatgcgactggcgccaattccttgtactctttcgtcgaaatgaaacgcttacccatgttgctacatgcctcgatgttgttctatgttgctaattgtaatggtcggcgattactgttcacgcatagatagaaataagatccatcttgagcgcgagttgcttcatctcgacagcgtagttctgccaacgtggtcgcttccgacagacggcatacccattcggatctggatactgtactagctcgtcgggtcgctcattgcggatctcacagagcttccgcgccgccttttcaaactcgcggaagtcacgatctagatttcgactgccgaacattagtatgcctggcactctgggcggatggattcgcgcttgcgcatactctggtaataagcagaggtctcacactgtcctaccacctcatcccagtcgttgccgccagtcaggacctcagggccctttgggagggctgccatgcactgctggaacagctgagagcgaagacattggtcaggcatggtatcggttggcttcggcgactgtccacagccaacgagcagaacagcgagagtgataacgaggagcttcttcattgggattcacgcttcttacgaatgatgagaacgagttcgcggcgatcgacttcgaccgccccgtgcatagacgtccataatcaaggtcctgtgatgtatccatcgttgcagccattgcaacgatagtagttagggtcgcgtgtcttggagaacacattcgcgccgcaaccacaacggaatgtctttccgccttgcttgagcagcgtgtccgacttcggaagtggatcatggaaaccatcggcttccacttcatcttccaacagaaggaggatgcggtgtgcaatcgtgcggtactcaagcgcagtctgagaatcaccggctgcatcactgaggcgagcaagctcgatcaggctctcgactaccttctcaaagctatccatcgttcctcatccacttcaagagtctatccatcggcttgttcatgtcgcgatagtgcagacgattgccgaccttgctgagccagtatccgacttcgatcatgcaggtcgtgatcaggtggccaatcaggactacaatcaagtacggaatcgcgaggggcagcacaagccaccacctcggattcttgatcgtccgctctgaccttgtgcgctgttgccaaggcttcacggctggtattcccaacaggtgttatcggggattagctgacggtgctgcacccagccgcggaggttacctgaccacgcttggttatagcggtcctgatgcgtgatgcccggctcccatgtatggatcagctcgccctcttcatcctggatgtaggtgatcggtgtcgcctgatgttcaaacggcgaagcatgaaccggcttggactcgaccagtcgttggaagatatccattgccttctcgaggctgtcatcgaggcgacggtacgagacctgagcgcagcacgacgacgaaattgcgagagcttcctttagggtcatcccgtccgcatgcttactgtccagatcttccatctggaactgaccaatgcgtacgtacccagaagggcgccagtaaccatccttatagtaagggacgtgccactgaccaggagcgagctggacaggcgtgctagccgcgcgtgctgcgtaagcaacctcgcctaggcgctggatctcgggctgggcatctgggtggcaacggagccagaagaaattgtcgtactcagttgcggtgactacaaccttgatatgcgtgaacggttcaagcagtcggttgacgatctgcttatggtagcctgccttagcgaacgcacgagcaacagaaatagccaggtcgcgcgcatagtcccatgcaccacgacgggtgttggcaaactcggttccgtttgtcagctggacaggagcatcgtgctcttcctttgcagacatgcccggttgattcttaccccaatggaccggcgctgccgtgtcatcgagaatgagctggatcgccttgtcaacaggaatggcacggctggatgctgcgttgcgcgagaacagacggtgggtcatgaactcggcatggataaaacgtgggtactccagctcaaacgtcgtgatacgaacgccctgcggtgaaatggagtcagcaattacttttgcgctaatcgtcatcgatcttcctctctgtcaatcgtcatatagtacagcttatctgtgccgtacttaatgtgccttaggaacagttcacagaacgtatgccagagcgagcgcagcgttccatccatcttcggtcggctcgaagcgagcgaacggagaatagaatttcttgctgcggctgaaatgcgggtcgagcgtcttctgcttcttgatctcgtcaaaatgagtgtcacggaagaacaggatcttgttcccctcgtaagacgttgcgtccggatagtggacacgcatgatcgtgtgccccatgatcacgagcgccgcctggatctcaaagttggcgggatcagggttcggtgccttcggaatgtaggcaggcgtgcaataggtgctcgcgctaaagcgtggaccaagtcccatcacattctctgaatcttgtctttgaacggacgaagcacctgcgggatagcaatgtcttcgccaatgtagattgttgggaactgcgatgacatgaagcaaccatagccttcctcaacatagcgttctgctgaccgcttgtattcgccgcccgacctaacgcacgcgtcgtagatcttcgccatggtcagttcgtgtccgccgaaaaggtcaaacaagaacaacccgctttcaaagtcatgaacaaagtcgagctccaggacacggatcatctcgcctgcaagatcatggtcgtcggtgacgaaagcagacttggagacatagcattcgtagtcagcatcttcaccgacatcgtatgcttcatcgagtcggcgcttgccttcgatatatccgaggttcctgtcagcaactttgacatattcttcaaagcggcgaccgcgcctctcgtcataccggttggctccccagagctcaacatactcgggggagccaggctcgaacttgcagccgagaccgtaccgattcatggctcagcgacgccccgaattcggcttggtcgcatcctcgaggttcttgaggatgtcagagatctgctgcgcggtgtacggcttgcgcttatcggtcagcgcgccaccaagagtgacagcatctgccacgagcgcgacaggggtggtaacggcgccaacagcagccttaagaagcgatccgaacatttcctttctcctgagtgagttctgctactacagcttcgagttcttcgacagatacttcggtgaaaccacaccagcggtcaccgtgccattcgttgataccgacgttgacgtgcgagacgaatcgcgcaccatcgccgaggtcgtaggtaccattgcaaagctgccacttagcagcatcctcgaggagcggacggatccgctcgtacatttctttggtgagccagatgcgctcgaccggaacgtcgttgccgcttcggaagcgaccgtcgaattcctcaatggtcttctgggcgctcactcctcttcttcctcatagcggaacggtgcctcgaactcgatgtagctttcgaggtgcgagatctcgcggttcacttcggcgagcatcgccttagcgactgcttgctcttcggcgaggtggcgaaggcgctcacgattgtcggcgcgagcacgattggccgcctggatctgctcgatcagaacttcgatcacatattccggtgcgtcagcttcgcgcgcatcttcgatggcgtagccgaggcggtggatgttgccgacgaggatcggacgctcgacttcattctcgaacgaagcagcgtcgcggttctctgcgatagtttcgttgagctcggtgcggaggtcggtcaggaactccaggtaacgctcggaaaggatctggttagctacgatgcgcgggttcattggtgtttcctgtttggactgttcgtttagtgtacggtaaaagagttctgtctcagtctttgagagcgatcgggagcatctcaaagaagaaagtatcgccgaggttgcctgtcgtgttcattcgattgcggaactcgaaaaggcgccgcacatcgttgatacggatggtgtcgcgattcggcttctcagggcacgattctttcgtatgtccgaaacgctcgcatccgcccgggaagccttcgtgatcgtgaccgtcgtgatacatcggaccttcatcgctcatccggtcagcagcttctgccagactgtggaaggacgcgaagatgccgccctgctgctcgcgaattttctcgagctgctcaatcaccgacttgaaagcatcctcagcataacccttgtgaccttcgctgaggtacatcgagccatgacagagggtgttgaacatgtcgccgagttggcgccaagagactgtcgggttcatcgcggcatcctatactgcgcgtaatggttctgtcccatgaggaacgcaccgttgagcgcgctcaccagacttttcgcgtcgtcgaaatcatcgacggtgcggatatgcgttccctcgtagagcaccttgtaaacgacgccgccgaagaagccccgcagacgtaccttctcgtatgtgtacggctgatattcgtagtcgatgttcatccgatcgtgtccgtgtcgtaatccatgaggtcaggctcttcggtgccgttgagcatcgcattccagcacgcaacatcgtactcagcgcgcccacgctgaagatacatgttcggggtcaggtacgtcttgtcaaacggactggcacctttgcgaccgacacagacatagtactccatgcccttgctggtcttcatatctccaacccatgctgagatgggttcctggacctcttccttgaccagtcggtaagcgatgatctctgcaccatttgagaagagaccgctgcgatcaccatgttcccaatcgagatccatcgcatcacagatgtcgagctcgtcgtcaggaacttcgctgcaacgcatcttgtactggacgagcgtaccggctggcacagggcaagcgccaccgtgccacgagatccactgaccttccaggtacgactgcgcacgcttgagtgggtcgaccagaaacatcatgccctgcttgccgaggaacaggtcgctcggcttgccatccgcgtcgtcaggtagaagctcctgcgggtagtagcctcgatcagcgagcgaacgaaacaccttgagtgcgtgctcaacgcctgagattagatcgcggatgacggcggtagacattactgcgggttccggagttggacgcaggagaggttgttggacgagtgcaggtattgatagcacacgatgccgaacttatcaggcttcgaaaatcgctccacgcgattctccagcgggttgctcgtcaccgtcgagtcgttcatctgatcggtgtcagcaacaggcgcgataggtgcctgcggtgcgcacgccgagagagccatgcccagggcaagtgcgagaagtgctttgttgatcgacacaggaaactccttactgtttgtcgtagattgtagagccgaatactttctgttcaacgtcgagaatctcctcaaccatccagcccggcatcacgtcgttctcaagcagagccttggcgtcgtcctgcgtcaggtagccggagaagttgaaaaattgcttcgcgcaggcgaggtagccgcccatgtggaccatgcccgaaatataggcatcgcggtcgccgcggcagtactggagggcgaagagacctagcccatgttggaacagttcacgcttccgctcgatcattttcgaatccgaagaagtcagccgcttgttcgcgggtgagaaagattggatagtcaggcgtcataatgcacatctgaccgttgatttctgctgcctcgacgacgccatcgtgaaggtggtgcatcgtctggaggaagatggtcttgctcatacctcagcgagatccatcgagagctcgcaggcttcgagcacgagacgatagttttcgtcactgaggcgctccctgagcatcgtgtcgatctgaccgaggcgaattgccttctcgcgcatcccggtcaatgcgatcactgctgcgacatctgcttcgttgctcatccgagctctccgagaatttcgctgaccatggcaaggtcatcgatcaggtggtgcttcgattcgggaagaagcgaagcgagttctgccgtcaggttagcatgcacagacagaagctggtcgaaatccatgtctgagaacttgctcatactgcgacagtctccatgatgcgcttgggcgccttcttctttgccggcttgcgaaggaccgacttcttcgggtccttgaagttccaggcgaagttggtcggctcgatggtgtgcgtctgcatcagcgccttcatcttgtaatcgcgatagcgatccaggttcgtcttgacgggcgggacccacccggtgttgtggccacgaatacggagaccacagtcgatgatgataccgtcacgatgcagcatgatcagccctcgagaaagattttccagtcgatcgggaagttgatgttggtcggtgcgcccttgaacatgggcgcgatgtcttcgtcgcggtagccggcaagcccacagccgatgcgcgtcatgaagaacttttcgttggagaagcggcgagcgaaagcgaggaacatttcgacgtactgctcgataatgtcgagcggcagcgtctggatcttttcgtctttcgtcgggatgccgaagctcatgccctggaagccgaagggcgtaccgtagacggcgccgtagtggtcgacagccgcctttgctgcaccggctccatgtcgtccggcttcgttggagccgaacacaaagacttcgtcctgtgccggcgccgtgttgtcgatgtggtaggtgtaggtcaccttactgttccttggacgccgtgtttacgaccgggcgggtacagttctttccgcagctctcgctgtagctgaccgacgccgacttggtgcagtctgcgtaataaacgtaccgcacgttgccatcgcggaaccggtagacgatgcagccattcttctcgaacagcttttcgacctggatgccgttctgggtgtaggcggcttcctgcggctgcgagtactcgaaacagccagtcagggcgacggcagcgagagctgccacgaaaagaatcttacgcatcggtcttcacctcgtcttctgccttagtcttcttcggcttcggagcccgcttgagcgcgttcttcgcgaacaccatctcgacgccgttgacgtcgccgaacatcttcttcgtttcatacggatacttccgcacattggtcaccacggtgccgacgggcacgaactcggtgatgtagccatccaggcgattgccgcgctgcgccccgaccttgctgagtcccgggacgggcgaaattactacatgcggctggtcgatcatttgagggctccccttttgaaatttcggttcggcggtcgttcccgccacatgagtaatgctaaacgggatctatttcgtgtcaaacgcaaagaacccacgtttccgtgggttgctttgaaaaaacttaacttttagcggaacgacttgtgcttggaagtttttcgcttctggaacagattgtacacgaaaattccaatgccaccgattgccaggactccagccgccagcgcgagccagatagccaggatggcaaacggtagggcgatcatgccccagaacggtgcagtcacccaccaccacgaccatgtgatatatccggtcagcttgagcgtgataaagatcagcccgagcattggcagaacaggcagaccgcgcttgatgacgacggtattcgtcgggacaggcattctacgatccaacattaatatctccttagttaagccttagcgagctgcatcaggctgcggtacatgtcttgcttcttggtgtcgccgtgaccgacatacgcatcccagaactgacgggaaggatcgcgcttgcctgtgccgtgcgtgtagtgctcggtaattgcgttgagcgcgccgtatgcggtgcccttcgagtatccggaaccactgccgccgagtgccaggtcggtcaggcgagtcacctcgcgcgtcacgccccatgtctgttcgtctgcgcggcgctctggattgaagagctgctcttcgaagaactcgcgcgtctgtcgagccgacatcttcttgttggccagagcacgcatattcttcatgaactcgtcccagcccttgtcgatcagcttgaggtcgatcttgacctgggctggatcgaaatcgcgtttgtgtgtcacgcgaatgaccggacgggagctaccaccctgcaaggcgatcgtcagggtgttgttgcacaccacgcgcgtcgaagtgaatcgagcctgcgtggacattgtgccatcgaccgcagtcgtcagaagcaggtgaccatcaatgcgatcagtgtcaacgacattctcactcttgccgacgtctgcgagcgcccagaaacgacgaccgccaaacagcgaacctgccgtgctgagcttgaaaccgtgctgctcaacgaggtctcggaagaactcgatgacctgatccggctgcactaccttgaaatcgttcgacacgataccaagggcgtccttcgtatccgaacggaacagcactcgcttatccgggatcgagaacttttcgggctgaccaagcccgttgatcgcggtatagtctaccgtcgattcatggacttcccagtccagtcctgcgcgcttcttccagtcgtcgaaagatgcgttttcatccatctgctgaccaagcccgtgccaaattgcatcgcgcgatccggtaaaggccatctcactcgtgccatctgcacgctgcgtaatctcatgtgccattcaaagagtcctcatcaataaaattgccaaataccacagttcaaatactaaagactactattgtctagtgtcacttgttcttgaagtctgtagcgtaccaacctgtacctttaagctcgaaaccacctgcagaaatctgtcggtccatcgagacaggatcaccaccttggtcaaggcagccttcagcacaggtcggagcagggtcagagtatttctgcatcttgtcgcgcttggtgccgcacgacgggcattgaaattcatagataggcatagtaggaaatctccggatcgccattgagtcgataggtaaagtcgtacgggcttcccgaagttaggtaaggcgcccacccatacttatcgcagatggtcttgatccatgcgtgaaactgtctacgcgcatcttcgttgaacttgtactgcggatacttgacaacgcaagtcacgtaatacttgtcaccgcgcttcttgaacgtaaggtcggagaaaggaccgcttttgcagtcctctctcagagctttccagatttcctgggtcacttggctggctcgacattcgggacagcaatcaacttgcatgtctgaactcgcggaagattcttctcgcaggtcgccatcattgccgggatgtctcgagggtccatatgaacacggttctcgagatcctccttgctaatgatgctgcctagcatgatcccgacgaccacactaagcgcaacaatgtagagcagctgcaacggcttaatttccatttcagaactcgatgtaaggattgccgacctgcacaacattcaagccgaggtcacgccacatgcgacagaccgacgggcggtcgtcgaggacgacaacgacgttgaagttgggcaggatgctctcacggaagatctcttccttgatcactgtgtccttgcgcgtatcaccctcggggcgcatgaacaggaaccagtcgtcgatctcgtgcaagcccttgacgtgcgccttgagccagcgacgagtccgatcacggctgacaccatcgcgaccagacgtgaacaggacgtaatggcctgcggcacgaagaccctgcaccattgcgatgaccggctcattcgggaggtcctggtcgaccttgtcccattcgaacggaccgcggactccatccatctttgccaccgtgccatcaatatcgacgatcaccgcagtctgcttggtaacgtcgagagtcgggcgggaaccaaactcgtcgaggtactgctgatactgcttctggatgacgtcgtagccgacagaattcggacggaccttgtcgcgcttgacagcttcgtcgtaggagatatcgaacgtcttgtactcgacctcgaagccgagtgcagtgagttcgttagccatctttgtgcggaaaggacggttgaggttcgtgtccgagatgatcacgtgccacccagcgcgggcagactgctcaattgcttccttgactcgggcagtaaccttatcttcccacttccacttccagtttggccagatcggctccaggccagcctcgttcatgatcgcagtacggatgtcgtcgcgattgatgttagaccagctctcgccgtgattcatagcgcggtcacgcatgaatgcctttgcccaggtcgtcttgcccgacccagaaataccgattgtgatgatagccttcacttgatgctccagtctacgttgccggtctcaatgagattccggacaaccttgcccgcctgctcggcggtaatgttctcccactcgtggacaggtgccttcgggcggaagagttggtcagcgaccactcggtcgagaccgagtaagttgcgtgcttcgtactcgaccagataccattcggcttcgccgtcaccggaatcgtcgagatcagcgatcgcctgttcgacgaacgcctctgccttgcttccgaagaactgtgttgctgcgccagcgatgcagcaaattgtgccacagtcgggctcgttcggatcgacagcaacaccgtggttcatatcgaatacttggatacccgccttgtgcggtgctccctgctcaagccactcagccagaatttccagtcggtcggtacgcatcagaatgttcccttaaaggtccagttgacttcgccggactcgatgaattcgcggatgacgctcgctgcctcagcagcagtccgacgatggagtgctggagggaggaacagatcggatgcttcggtctccgaaagaccgaggaggtgggtcgcctcgtgctcgatgtcgtcccagtctgcttcaccgcagctgaccgcatcttccatcaggacgcgcttcgtatcttcgtcgccgaagaactgtactgcggcgccggcgatgcagcacactgtgccacactggttgagctgttccatgttctcggcgtttgtgaacatacccgagcccatgtcaaagcctgcaacattatcgcggtgcggagcgccagcttccagccactccgcaattacaacgagccgatcgacccgaggagtcattgctcagtcctcggacgctgcgagcgctgcatcgactgggttgagagccacttccgtgctcttggcgaacaccttgagcggctcactcagcgcgagtgacttgatcgcagcacgctctgctggcgtcttggcgcgggcgatcatgctcttgatgcgcttcatcgaaacacgcgtgccgacgaacgtctgtactaccttttcctgctgtgccatttcgtttggttcctgtttgcctatgcgtttagtgtaatgaggaaatgtttctttcgtaccgttaactgcccagcttaccgaacgccttcttggaaaggaatttcgtcaccggaccttgcaggtgcttcacccagagctctccggcgtatgcgcagaagcagacgaggaagaccgcgaaattgacgatgggaatccagcaaagtgccgcaccgaagagatacccgaggagcgaaccccacgtcgtatcgttgcgacgcatttcgtcgatgaacacccagcccaggatcgaggaacaaccaatcgccgatacgaaatagacgatagttgtgaaaagtgcccaggtcatcgcctcttccctccgacgcgctggctccagtactcgcccttgaagatccagttgatgaccgcctcggcgccggcgagcaggttccagacaatgaatccgagtccgaggaacgccgccgagaccggtacgatcactgctacgagcagaccgaacccaatcccgagatactttcgacgggttccgccctgctgccacgttgcatggaagatttggatggcaccaaacgctgcgagcgttgacaccaagatccacagtgtgatagcaggggtcatcgcttcggtcctccgatcgtcttgttcattagcgcagactcattcgaccaagcgaagaaatctactacgaagtcgatcaggtagaagattgcgataaagctgttcaccactggcatcgggatgaagatgagcatcgtgaacagattgccaaggaggctacccagccgaatgccatacttgaagcgatccttgatccagcgaccagcgccgatcatacagatcagaagcgaagcgccgtagatgtaccacatgagcggagtcactactgcgaacatttcacttcctccagaagcagatgggcgtttcgaggatgttgcggatttgccagcgatgcttatcgtagaagttgcacagtccgacgaccgttacaacccagttgacgaacggcacgaccgcgaggatgaacatcccgaccgagccaaggatggcaccgatggtcgggcagccgtcacactcgatgtcgagcttccaacgacggtacgaccagactgctgcggtgaccaacgaaattgctgctgggaggacgatgaagccgatcaggaagatgaggtcgatgggcgtcatagttatgctgccatcgcgatcggagtgccaggagtgccaccatcgtcatcgggcgagggctgcgtcgggcggacgagttccggctgcggtccgatttccatctcgatcccgccctgggcgaagtcgaagcggaggtagcgcttcttttcgtcgcgcggaccgaggtggtagacgttgtactggattgcgcccatctccttcgaaatttcatccagcgcagagtccaccggatagaagtggtgctcgtcatttgcaacacgagcgaaggctgctgcgagcagagccacctgattaccgttcaacgtgatcatgatctagaaatttccttcaccgtgtttgacaccataccacaatgatacggtatggtgttgaaagaacaagttacttgatcgccttcagctctcgggcatacatctccggcgctgtgtcaaccttcaggctttcaagatatttcgtgtcagcagcgatctgctcctgtagctccgaaattttgtcaagggtcagattccacatcggcatctgcaggagcttgtcgtagtccacgaaattttcgtcggtgaggaccttgaccagcgcatccttcttgctattgcggaacaggttgacattatccagatagaactggatgaaacgcatacgctcgttgagccagcgaatcttttcgttcgtctcgccgatcaacatcaggcgacgctgttcgtagaagcccaagcgcaccttcacgaaatactcgatcagtgcctcaggggtgtcgaaggtcttgatcttgccctgctcatcccagacgacgatgttttccgactcacgactgaccaggcttagcttgtcggtcagaacgtcgtcgttgttcttgaggaactcgcgcgtggtgtagacgagaatgtcccagcctgcctcggttgagttgtcatcgtaatccttgatgacttccttctcgatcagcttcgacagaatgcccttgtacttctcgaggtcatagccaacaggcagctcagtgatgcgaagcgtcgtcgagttgacacgctcaaagacaccacggaacgtcgtctgaccatcgaccttggagattgtacccttccagccttggtaccacgggacgagcttggtctgcttcttcccagcgagaacctgctgtgcatttcgcacaacgtcggcagggttgtagttgagaatcttgcacgagtacccagtaccaatgcccgagccaccattgaacagaatggtcggtaccttcgggatgaagaacttgggctcgatctgctcgccgtcctcgaactcatattcaaggatcaggtcatcttccttgctgaaccacttgcggaagtttggtgacccctcaacggagatgtatcgaccgctcgacgcgttgtggtcgaggatgtttccgaacgtgccgtctggggtgaaccaattgacattgttcgaggtcgggaagtcctgcgccaagccgacgatcacgccctcgagattctgcgcgccgtgatggtatgcagtatccgatgccaccttcgcagcataccgctcgacggtgttgagcgcgttcgacttgttgatgacgtacaccgccttgcgctgactgatcttgaaaccatcaatcatgttcgggatgctgatctcgcaatcgtacgtcgagaagtcgcggaagtctctgtccaggaagtccttgatgcggagcttcctgatgccgttgtctgtcacttcatcttcaaagaatttcattcgagatccaaccatgcctttcgcttatcggtgaagccagtgtccttgaggaagcacaggtcaagggtttctttggctgcgttgtccattgtaaactggacaagatatcgatccaggttatccatgtacttcttccacagcttcggaggcgacgagccgaggcccttgaggaatttgtagctgtacttttcgctcgcgtgcttctggcgccatgcctcaaactcttccatcgtgaagaactcaaggtcctccttcttgtagctcacgattgcaacaggcgtgaccagtcggtacacgagtcctgcctcaaccaggttgggccacaagcgatagaacatgttcacgttcaagcctgcgatggagtgaccgaattggtcagcgtccgatgccacgatgatgcgaccgaagttcaagttctcgatgtctgccgcttcgccatacttcagaccgacgatagtgcgaacgtcctcgaactgctcgttctccttcaccttagcgagtggggcagccgagacattgatcgggcgacctcgcatcggatagacagcatggaaacgcgggttgcgagcaccacggagcggtcctgccgccgagtcaccttccgcgaggaacagcgagcagagcttgcgattcttctcagtcgcgtcgttgaacttcttgatgtgctttaggttggtcttctcgccctgcttgttgagcttgcgaagctccttgagctcttcctggtgcgcctttgctgccgcccagtcaaggaccgactggatgatcgacgagccgatgaccttcttgacgaacttgtcgttgatgctccagctggtcttgaagtccttgacttcggtcatcaggtcgtctttcgtctgcgacgaatagcgcgggttgacaatctgcgcgtcgatgaacagctggaaatgttgcttcagctctgacggcttgatgtcgatcttgtgctttttcttgatgtgagcgcgaagctcagcacagatttgattcgcgacataatcgacatgcgtgccgcccgttttggtgcgggtgccgttaacgaatgaggtatgtcgaaaaccatcatcagaagcagcaatggcaacgcgccaattatcgttctcatcgtagacgtactcgtcagtgaacagcgcgacgtagtccttgaaagacttgaacgggatacgcgagccgttgaggtaaaccttcaggtgaggattgcaagctgcgatctcatggacgcgagcgcacagcattgctgcattgtcatcatccatacctgccatgcccagcttttcgaagtccgggtagtaggtaatgcaggtgtggttctgcgcgcctggccgaacgactggcgggttgcgagtctgcgaattgtcttcgaagaccatcttgaacttgttggtaccgtcgcacgtctcgacaatgaacttcttggagaagatgttcgtgagcgcagcaccttcaccgttctggccggtgagcattgcttcgtcagcgtcgtcgaaattcgagcctgcacgaagctcgaagatcatctccggaacccactggttgtattccttgtgcttgactacagggataccaccgttgtcgaagatgcggaccgtaccatcctggaagtcgatatcgaccttgatggtgtcgagatgcttgccttcggggcgcttggagtggtcaacggagttcgagatgacctcatcaaacagcttgaggaagcctggattgtaggtcgtctctttctgttccatccccgccgccgtccaatggaattccatggaggtatgcggagtgatagcgccgatgtagcggcctgggcggagcaggacatgctccacctcggacagcttacggaattttgattcaatggacttggacatggtttcccttatgccggaacattgatgccgtaatcacacttctgattcttgtactcgacgggatcgagtgcaacgatgtaccaatcaggagtggtcggctcgttgttccacttgaggttgtatgcgttgcggtattcttccgcttcccacttggtgtcgaacggaccagcataaccgtcaatcttgctgccccaacctctctcagattccagatgaggaactacgtagcgcatgatgttctccttagcagccaatgttggaaggaatccagaactcgaagtcgtgaccgtactcgtagaggccagccgtcgatgtgaaatcgtctaccgcgccgttgatctgcccgtcatactcgaaatatcgcagcccgtcttccttcacgaactccatgaactcagctgcgagtgctttgcgctgctcgtagacagtctcttcgatcttcgtcgccttgacgcgaagctcctcgagcttctgtagagcgtaattgcgctccgagatggtcggctcgcggtaatcagaatcccaatatgccatgatatagtccttacatttcgtgatggtgacgaactggacgtgcgtccatgtgtgctttcacttcctcaaacgaccacggctggaggttgttgccatccacgcccgcgtcgaggatctttccggggatgccggttggcttgccatgaacgtgtccatggatgtgccaccagcctcgatgaatctgcatccattcccagatagggaagtggcagagaacgatcggctgaccgtcgacagaaatctctcggtacgagtacgggaagatttgcttccactctcggacaaagcgaggatccttgcagagttgcctgtcgtgattgccagggaccagatatttctcaccattgagtcggcgagcaacctcgatgcagtactcgaggttcttggaaccgaaatcgccggtatggtacacccgatccttcttgctgatcttggagttccagtctgcgatcatctgctcgtcgagctcttctaccgtcgcaaacgcattgcgttgcgggtagtgcttcatcaagttgccgtgaccaaagtgcgtgtcagatacgaaaaatgtgttcatgctgagtatgatataggagagggatttctcatcaaccaaagaaaaacctcgcaagatttttcacgtcttgcgaggtttgaaggccttattaggcgatgacgaggtctgtaatcgtcagaactgcatcaattggtgtgccgtcaacgaaattcacgttagcggaaatgtcccaagtgccggcagcgtagacatgctcaacgtgggctgggccaccaacgagcgtctgaccgtcaccaaaggtccagtcaacggaagcaatcttgtcgaggctgtgaacaaccagctcaacacgacgaccatgcttgaccgagaagatcaggttacgggtgacaccctctggatcgaggaaggacttgctaccagcgtttggcttgtagaaatcaactgggacttcgccgttgaggtctgcggcggtgagagcacctgccgtcagctgttcgccggtcagtgggtgcgcccagccaattggcgttggtacggcttcgggaagataattcagaggcattagctctctcctgtggaaatgggtttaacgtccacaggtatttagccttttaccaaccaatgtgaatggcaaacgtcgcgtagagctcgtcctttctatcctcatcaatgccgccgccaaagcctccagatggaggcgatgcagggccaacctgcttccatgccgcccggtaaccgagcgccttgagcttcgtgatcagtcgatcctgataggcagttgtcgtgaaaggcgacgaagggaaatgcgtatagacgcgttctgtcttcgacgtttcctgatcatgccatacgtattcgcgcttgccatactcggcagcatccttgagcttaggctctagtcgctctagagccttgtctaggttcgcatcggacagcttagtgatctctgctagttcgtgcgcgctgatcactgtggtagttccttgtgcatctgataggcgaacatgatgcctgcttcgatcgtcgctgcattgtgtcgaagtgcaacgtggcgtggcaacacctgacgaacaacgctcatcaaatgaccaagctccttgccctgcaatccagtgagctgcgaaacgatgataccgtttaccttctccttgtactgcgcgttgagctctgcttcgttgtcagcatgttcgagctcgcgcgccagatgagggaatacttccttgtgcctctccagccaagacgacttgtcagactcgacatactcgccagtgaagttgatacgcctcaagaatgcctgatacgtctttcgttttgaatcacgcatccgagcctgatggttacgatgctcaagcgggaatgcacaagcctcaaagttgcgagatgtctctacccagtcgaacatttcgtcgaaggaatcgaaaccctcaacgtacttctttgtgtcgaagccgagataattgatcgcaatcaggtagtcgtcggtgagcttcacctcagcaagaacacggtcattctttctgtagatgtaccacagaccatcatgcccaaacttcaatccttgacgatgtgcgatgcgcccgatcaggttaccaaggtcgttccacgagaagtattcttttgcgaaggtgaagtcagacatgctcaccttgttgaggtcgacctgaactgatttgtcgccgaagtagatcagtagattgtaacctgagggattcttgatgaagctacgaacatcaaactcttgacagagatgaacgaacgcatcttcgcatccaatggagtaaacaaggatgtcaatgtcgccatgactatccttgctgcgcaccgatttgggaatcacaaagtgtgtaccatggaccatcacttcatcaagagatctgattaggtctcctgtgagcactttgtattctgctgcggacatacgttccgcagcgtcaaaggcattgccgcccatgattactccttttcgtagccttcctcaggcttcggctcggaggtgatgctgttcacactccagcccgtccatccgacgtttttcatcttccatcggaagttatctgatcctgcccacactgccaggtgagctacttgtccggtgatcttgtcaccgatgttttcgatcttttctctgatgctcatttccattccttctctagtcggtcaaggacggcttctagttcttttgcgaagaggttttctttgcgtccgttccaagcattataggtacccaacgtacccttcaccaacctgtgtctgatactggatatggtcgtcggctctgggtcccactgattctctaggccatagcaggaacagtgagaaccgttcacctcgaaaagctgatcatccttccgcgtcacgacaaaagcgtcgccggcgtagtcgcggtactcgtagtacgcgaacagaacttcgtgaccgtcaaggtcaagcggcttcctcggatagtcgttaccttccgcgaactcgtagcacagttcttcaatgctgtcccagtcgccaacgaacaccggttcgaatagtgctggctgcacctgtactaccgtgtccgtaccgagcacgggctccgccaccttagacgcatcgtgatgctgcatccacttagcgagcttcattccggcgattgtttcaagctcatcttccgtaatgttcgggtcagtgaggtagatgagatccacagcgcagacgatcaagtcgatcgcttcgccaatcacaccctcgcctttctccttgtaggagagaccctcagcgatgagaatttctgttccgacctcgccaagctcttcgcccgcatgaagataagactccatgcgagtgcgattgtctttgacatacttggaggtggcgagacatttcttgatcaagctcatatcgtgaagctcacaggttgatacggtggaagatgggcagggcgctcttgcgggtagccccgcgggttgcaaaggacccgagtgccagcgatgtcgtagtcgaagaaatcgtgcgtgtgaccatgtacccaatgcgtaatgttgtactcttccatcaaccgctcgtaggaattgcagtaagcatggttgagctcaacgtcgcttcggtaccgcggcggtacagattggaacgaaggcgcatggtgcgacattacgaccttcattcctcccttgtcgttctggaggaaattcagaagcgcattgtaggcgattgcgttttcgcgcttgacatcgcgcgtttggagcttggtgtagccacgcgacttgacgcggatgtgccggtagtcgttcatggtcgagccagcgcgcaattctgcgagcgggttgccaccgaaagcagtccacatcgtcgatccgaaaatctcgatgtagccaccaacgtcaaacgaacggttccgaagcaggtggatgttcttccactgttcgaggaagacatcgagatgcccttctgcaacgtcgatttctgacttgtagaactcgtggttgcctgcgatatagaggacgatgtccgccatagcagaagcacggtcgaagaactcgtgaccgtgcttcctcaggtagtcctcttcgccaacgtccccggcaagaagtagcacgtctccgcgccacttgtagaactccgggttcatatcggcaaaatcgagatgtaggtcagacgcgagtccgaatttcattgtaaggtacctcatagtctcgaggcgtgagcgtacggagatactcgtaagacatccgtcgctttctgcctcgcctgctgacgttgaagcctgcaggcacattgttaccgccatgataccacgccttgcagcgtgcgagcggggtgagttcgccagtgaccttgatactgtatagctgttgcttttctggatgccagaaatagccagggtagttaggtactgcgatcagttcacttggaattgtgttcattgtcgtatgggtagagttcgttcatccagttgacgaggcgctccaacgcccggtcgatcttcttggtctggagcacccagcagatcagaccgagaactgcaaacagcgtgttggcgatagggaacagcgcccacgatgacccgaacgcccattcgtagaagaagtgcttccgacggagcttctcatagaagccggcagaggttttgtagatcttgtcgcgcttcatttcttggacgttgacccacaccgctcggtagcagattgcagcggacacgatgtagatgaggattgcaagaatcacagcttcttactccagaagggtgaggtacacaccgtagcgaggaacgctacgatagcaagtggaaagttgagtatcgggaccgcgccgaggatgaagaacgggaggaggtatgttgcgatagtcccgtaggtcgtgatccctttgtaagaatcacgacgcaccaagacaatcccacagatgacggtcaccgcgtaagcgattgcccagagcgccccgaaggtcacgcgaagggaacctggtagtcgaccgggaagagcgactgaagcatgcgcttgtcgatgaaagtcttgcgaccggcgatcgaaacttcccagccatctgcaccataggaacgcttggcgcggaacggcgagatctgcttgagcggcttgagcttgcccgacttgaacgaaaacagcgagcgctccttcgggtcgtacaggtagccatcatagccggtctggacgaggtgcgacgggaagcgaacaaatgcagtcacgaaatttctccggttaggttgtttacatcacataagcaatactaaacaggaatcatttctcatcaaccaaaagaaaaccctagcttgacttcgaaaaagtcagaggctagggccgtgttgtacttcgaaatatcggtgggtgctgcgggactcgaacctgcctctgggtggccaccctcgggcatctatgcgcgacctcatagccgtccatcgtcaggatttgggcccgtccgacgacttctcataaccatgcgctctaccaactgagctaaacacccgtagaaactggagcggatgacgggactcgaacccgtgacatcttgcttggcaagcaagtgctctaccaactgagctacacccgcagaaagcaccgcccggttaggccatcacggtgcgacactggattctcgtccagcgaccagctcgattctcgtcgagcacaaagatgacaggtcctaactactgccaccgacgtaacttccagagacaaccgatcgagaacacatatcgagttctattgccggtcaccttagtaacgctatgcgtgttcaggtctggacgaaagatatttacccaacgcgaagagtagattgtctcctcacactggaactcgccaccttcgggatgggtgagcaccacgttgatgcggtagtgcttaccggtcttggtcacatcgcggtgaggcggaatgtatgacccaggcggatagcgaatgatgtagcagtccaacggcagcaatttgttcttccaccagagcagcgtcagaatctgatagccggttccgtgttggccatcttgccattgccagagcttattccgcatcgacttccatcactgtcatgtcaacgtaatatggtctcctcttgccactttcatgttcacgcatacgctcaagcgccttttcgcggctcgatgcaacatacagaacatccgagtacggatccatatctccgtactgctcgcggcggcatgcgtgtagcacccataccttcataatcaacctctcaaatggtgccccaggacagagtcgaactgtcgtctgacccttaccaagggcctgtactaaccgttgtactacaagggcattagaacttttgaccaaactggaatacttcccagtagatgagtgaactagataagctagacctacatcctttgcggagctcctcaacaacgcgattagcgtcatcaacagaagcttcaatcgaatgaaacggtgctcgtctaccactatcggttttatcaaagactacgtatagcatagtcactctctgtttggtgcgcagtgtgggactcgaacccacaatgagacgtttcacgttcgtcctcttgccaaaagaaagtgtctagaattctctaagggctcaactacttgcctactcggtctctgtctccctctcttaggagcgagtctgccaattcctctaaccgcagcatatttggcggagagcagagtactcgaaactcattccctttcgggaacctcgcgctttccaggcggaggcagcaccctggctgcgttactctccaaatttggcggagcggtgaggtatcgaaccccaaacccatcactgggttccaaccgatttcgaatcggagcctgccacctgacaggataccactccaaacttcttagtccgcgacaccctcaacgaatgggcgggtagccatatcaccggggaagacgcgattgttcttcagcgtgacctgagcgtagtaattgtacttacgctgacggtatcctcggcgcagctcttccactttctcagagcgagccttcgactgtcgggcatactcgtccttctcggtctgcggagcattccatcgaggatagggtggccacggcagcttgttctcagccgcatgattgtagagctcaccggtcacatcatggacaaaacgatgtccctgtcgcttgactcggatgacgacattggtgccggtgcgaccccaacgtcccttgccttcgcgcgttcccaggtatttaccgaaatgaagcgtcggtcgaccagcacttgtcgtcagggcgacgatatcatcacccggctggatgaccgcaccatcgcggttggtgtacggtacagcattcacagaatttgccatgatcactctcaatttggcggagtgctgaggtctcgaaccccaaacccatcactgggttcctgccgctttcaaggcggtggctgcaccctggcagcttaacactccatgttgatatttagcacttctcgctcgacgagacccagcgaccgttctcgcagccgttgccgtgatagaagtcgagcagctcgtcgtcgccgtagttgttgtcttcctgctcgtagtagctatcgatgaagacttcaaactcgcgatatccaatggagacaaaggcgggctcgtcgagttcaacagcaaggaggcgcagctcttcgagcttggcttcgacttcgttctcaagctcaacgatacggggattgcgttcggtcatgatgtatggagtccttcaaggatggatggaactttctcgggcggtacaacagaaaacggttggttcttcgcgtcagcatcgtccttgaagcgcgtgtagacagcttcagtcatgccgctgaggcgatagtaaaaatcaaggtagcttggtaggaagtacgtggagccggagagtgtctctacaaaccaaccatcttcgtgcttgtcggtcacttttgcaatgggcgtgctgaaagtccagctatcaccatcgaggtaaccaccttggtatccagcaaggatgtggaagtcaccatcggagttaaccagcacatacaagtctggacgacgatgtccaacaggaacagaatacattaccacttctccctaaaaacgtcgacgttgatgaaacgaacccgacgattgcctttggtgaacaccatgttatgttcaaccacatcgtcaatgaggacgacctctgtattgtccgggaaccagcctacgcgcatgaggcgcagcagacattcctctttgccgaagaggtcgtacatgtcttcccgcgaaatcatcttcatgctatggcggaggatgatgtcggaaatgtcctgcatcgacagtacgaactcttgattgaactccttccgaaggtgcggctcaagagccatttggagcgtcacctggaagtttgccttgtccttgtggtcccataccgcccaagagaataatccgagcttgtcgcgcgggtcaaggaacgaagcaatctttgagatgttatcgttgagagagttgcgatcgatccagttgtcgatcaccgttccctcgaggtcgagcagaacaatgcgtcccatcacttcaccacggttcggaatccgagttcgtcgatctcaacgatcgatgcagagtggtaattctcgtcctcagcccactcgtaggcttcatcgagagtatcacaggagaaagcgatggcgccggtcagcggctcatcgccgtaatcatcaatcacagcatatcgcataacgattcctcgatagtggcggagagcagtggaatcgaaccacagtccctctgttagaaggacccactcgcttagcaggcggcgtcggcaccctgaccgatttactctccactgatatagacagcggataccgagccgtttcggaacgcattgcgtacctggtgtgctcggcgctcgataatctcctgagcagcctcctcccgctcggctaggtcaccgcggtaccacaggggctgttcaagcctcggaggtaccttagcaagcccgtgcgaggggatatgctcagtcccagccgcccggaagacaggcgccctgggtttcattacttggaacgccttccgtggcgccctttcctttgctaccttcttagagcgtttcggcttcttagtcggtactgcggtgtaaaccaacatctcacttcctaccaatccactttgcctgctccaccgaagtgacaggctggagcggacccttgttgaaagcaggcgcgacagttttcttacgcgcctcgatttgttcctgagctaccttctcgcgctctgccatctctccttcgtatctgaccggcaccttgttctttggctcggtcgtctcgaggaagcgattgatcgctgaggggatgtgctcagtgccagccgcccgatatacgttgagcggcttagctttcttttccacgaactgctgtttgggcttccgctgcttaactaccttcttggccttcttccttgccttggtaggaacactggtgtagatcagcataacccattacgttttcgtttagccgcggagtgcgctcttgaatgcgtccgcgaaatactcgaggtcaaccacacgaagctcttcgttgtcgtagagcgaaacgaactgctctgcgatgtttgcgatcagctggtagtctgtacctacgttcgcatcgccgtggatctcgtagcatcccagatcagcataccaccctgactgaccgttccaagtatagacgaggcggttatcggagtcgatacgaatgacctcgacgacggtgccttccggcgcgccgccctgatcctcgagaatggtcgcatagaccacctcaggcagcgttgcgacctgctcaccatcgatctcgacgagcgggacagacggagtgatcggatcggattcgacctgctcagagacgatcgcattgtcgatctcggaggcgctcgagatgagctgcggagcatgacccggcgcccactcgacggtgtagatcgaattgcgcgtctcgatttcgtttccgcggatgtcgaggactgctgaggtatggatgtactcgccgtcaccgaaccactggtgcccgtagacgttaccttcgacccagtgcttatcacctaccgggatcagtcgggcgtgcttgatggtgccttgattaggcttgttcatgttctgctccaaggaattcatgtatcaaatgctataggggactaatttctacacaatcgtcgatgacgatatttcaaagaaaaaggaaccgaggatcgaagatcagactcaggttcctttggtgtggcagccccggtgggaatcgaacccacatcgcacggttcagagccgtgcagtctagccgttgaaatacagggcgatatagcgccgccgagataagatgcgtcgactcatctagctttccctgttcaccctcacgcgggctactgagcctactcactgtggtccgtctcgacttggttactaacctcgcccgcttcgtggggtccggctttcgcccattagatggtagtcccggtgggagtcgaacccactcaacttggttcaaagccaaggatctgctccgatcgatttcgggacaacagatttggttgaggatatgggtaacgctcccatcttcatcggttatcagccgaacgcccacacttgcaggctcatcctcatcaatttggggtgaccgacgagactcgaactcgcacgccttgtatcgtttggcatctggttcacagccagacttgtctaccattccaacacggccaccatactaggtcggctactaagcagtccaccacctaaaggtctctgctcgcctaggtagtttacgtcagacctaggaaggacggcacggttatcgaattgtgcagtacgattggatccttcgccgcccaattagcgtcctcttctattcgtcgcaagaggcggagcgacatgcacgccgtaacccggtgcacggggtaaacgggacgccaatcccgaatgtggtgccggagacagggatcgaacctgcgacgcgtagcttttcaggctaccgctctaccaactgagctactccgacaatgtttggtacccaggacaggactcgaacctgcacgctactattacttcgcaccgcgttctaagcgcggggtgtctgccattccaccacctgggcataaaatcgagagcagtttagagacttactgaggtccgttttatttagagcgatggatactttgcgtctagcacttcaatagcgtgcagagggctcgtacctggctccaacatgtgaatcttctcaaacccattctcttccgtgatcagagactcttcaggatcaacaccaccgcgatacttcttgccgtagctacctgtcaccttcttcgtcgctggatcaacgtcaccccacttaggagtgtgagccccgaggatggcctcaacgaagtactttctcccagtgcgtgccgaggtaacaatgaagcgcccggtgtcgtcagtgttggtgaggaagcgttgttcgagagtagccataatcttgtctcagttagtgaatgtctgacctgcatgcctttcacatgctacgttttcaacgctacggaatgtggtttacacgccacctcgtagacttacacgcttgcggtccgttcgttttagcagtatccaagctccttcgctcggtcggctgcgtaggatcctgcgaaggcgactggcttaaggtctggatcgaccatggtcattgccttgacatatcctcgcgccgcttccattgcgatgctcgaacctgctgacttcttcgggttgatgtccaagtgaatggacacttcgaagtcgtagaagatatccttgaagcgatcgtggagctctgcaaccttctccgcttccttcatcatccgtgtgaacggctttgatggatctgcgtcgtagtcgggctcgcgcgatacctcagcgaacatcttacaacccttacaaccgtcgatgtgaacaacgatgaccacagtgtagtcagcgtagaacttaccatcgacctttaccttctcggagtctgccccgagataaactttcgtctcaggcgacattgtctgcatgaaggcttgaacctctgctgcatcaattttctttctcataacgacacctgcaacgattgaataggatccgggcgatactgtctcgaactagtatttgagtactttaaaaacgccctagcgccttaacgccaccatgggattcgaacccatatctcccgcgttcatggcgggtgctctaccattgagctaaatgacagcgataacggttgcctttgcggacttcgaacccgcatccctcaccctacaccggggagtgacttaccttagtcgatcaggccaaattggtgggaccggcaggatttgaacctgcgatggactttcgtcgtcggattaagagtccgctgcgttcgaccgggctacgcgaacgatcccattgtgaaacttggtgaggcatctcagcctcaaaacttgaatgcgctgatccttcttgtacgacctgccgcgccatgtgcgccgttctgggttgtacctgctggtcatcacactctcctaatataggccaaaccgattacttgtcaacaccgccgattgcgcactctttgatgttgcttcctaatgtagtcctttcgtctcaacctatcggcgctcggaggacttgcacctccaacccggcatgccattaaatggtgggtcgcacttgctagcgttaagagattactccctgactgtcacgtttggcaaattggtagcggaggaaggagtcgaaccttcaatctcgagggttatgagccctgtattttgccgttaaactaccccgcatcaaaacttggtcgagtacatgggattcgaacccatcgtctcggcgctgacaacgccgaatcttcacctagcagacccgtactcgattttaactatggcggtctatgcgaggctcgaactcgctacgccggcgtgacaggccagcatcttaacccatagactaatagaccacttttactacgtgaccggcgctaatagcagcctgatcgaatttggctcaccgtgttggattcgaaccaacgatgggacttgcgtctcggtaggttaacagcctactgctctcggcctctgagcgaacggtgatcggtaaaacttgtttggcgcgtgatgatggattcgaaccaccgacctacgggttatcagcccgttgctctcgacgcggatgcgaccttcctatcgtcgatgcacggatctcgagctccatcacacctattgttggcttcgcatcaaatcgtccttcacagtatccaatcatccagatggccatccttccgatcttaaaccttcaccgctgagctaaccacgcatgtttcaatgccagatgtatttcgctgtcgtgactcgtgccttgcctcgatgacgagaggcgcgtgccattggactatcataccctagcttatccagagtcctgagcatatcaaacatcgcatgtctgatctcggactttggaacccttaactctacaaccggcttcttgtctgcgagtcgaatgaccctgcacccgtaaagcccattgccgaggcgagtcactttcgtttctagtgtctccatcactcacctcttgaattggtcggacatgtaggactcgaacctacgaccctctggtcccaaaccagatgcgctaccaagctgcgctaatgtccgatgatgaaacttggcagacccatcggggctcgaacccgattccactgcttgagaggcagtaattctaacctggtaaactatgggtccaaagaatgctatttgtcaaatgcttcgtggtcaacgacgtctgtgcaatcctgcgtccttacagacctaacctggaggcgagttgaagcgtttgagaaataccactcggtacatcatttgcttggcctgagaatacagccttacgtgtcagcccattcgatcggattatcagctcttgcggagcccttcccgtcttttccacgcgacccatcttgcgatgcgatctcgttgaccaacatggcagccttgttttgagtggaggcggttccactgtcatcgtaagctactcgacccacctgtttctctctgccttgcgagcagttcaaaggcgctaaccctttagatgcacttcctgatcgactacctttgaccttgcgagtctcgagtagagtcaattcactttcgtgttgaccattatgccactttcacttacgaccgaaccagactttgcgttttcttggataagaatgttggagtcgaaccaactgcctaatgtttgaaatacatttgctctaccattgagctaagtcttgaacccactaaggacgagctggttcgtaagtccatcaccttttgggtgacagcttcttacccgccctcctctaccttttcgcccgctaaggctacattgtcggtaggggagatgtgcgacgcttggaacatcgccactcctgaaacccgctcttgcccgctaagactcgaactacgtttcgtaccaattctgttatcaactgcgggtgtttgcttggcctattgccttgcgagcaattcgatctcccctacgccgttggcctcggatcaacccttcggacaccacccgttcctcagtctagctccgtttcaatcgaagcccgcccttcggcgttaactgttggcttgttctagtcggactctttcgagtgaggcgcttgtgggcgctatcctcattcggcacctcacggtaccttatccgtaaacagtacgcctttcgacgttccgagttgctagaccatacgtctcacgacgtttcacgccttatgtttttcgtcccggcgatcatcagtgatctggacgtcttactgtcttcacagtttagtgcttcgtgtttccactgcaacctaaagtgtgacacagtatcttgtttggtacctcgtgacgggttcgaaccgccgacccgctccgtgtaaaggagccgctctaccgctgagctaacgaggcatagattggttgtgacctcacgaattgaacgtgatatgcgctccggatgatagacgcatagccttacagtcacgtcaaactttggtggaccaggttggaatcgaaccaacggcgtccctttagaggatcctgatttacagtcaggtgccaccaaccaacagtagcctctgatccacggtgaaacttggcgcgcctggtaggactcgaacccacaaccctccgggtagaagccggatgctctatccagttgagctacagacgcagaaatttggagcactagacgggactcgaacccgcattcttctcattgaaagtgagaggtcctagtccaattagacgactagtgcgttgttactatgaccggcgctgatagcagcctgatcggttggagcgggttacgaggatcgaactcgtctctctagcttggaaggctagggcacagccactataccaaacccgcataattgcacctagtgctttgtctcgaacagtccaccactaggaggtctctgttcacggccagttgttcgagctggctatctctatcacattcccctacatgggtactaacgatgaatgtgacacaccgacgtttggtgcccccagtaggcttcgaacccacgacctgctgcttacaaggcagctgctctaccaactgagctatagaggcatgaaacttgaatttggtgggacgagtgggattcgaacccacgatcgccggattaaaagtccgatgccttaaccgcttggccaccgtcccaaattcggagagtccttttcgccaccctcaggcgtccgccggttcggagtcgtcacccttaatcgccttttacagcggagcttgacagtttcgttgaagtaggaagcgttgtccttccgtcttagcagagtgactcgactctgtgcttcgtgcctttcggcgtccccaatctctatgttactaagtttggactagatcgttttcgtgtcaaccttttcgtttgtcgttgagaagaatctcacacaacattgacaccttgtctactgctttcacgagttcgtatgctgccgggtttgtctctatctctgataggtacagcggaagaagattgtgtctcagtgtcgagaacgctaccccaccatctgcgcctgtgaacagatccagaatcggctgaagaacctttcgggcttcttcttgtgcatccatgatcatttcctgtttggtgcgcccagagggactcgaaccctcacgcccgaaggcactagactctcattctagctagtctaccagttccaacatggacgcgaatactacttgtttggtggaccgtcggggaatcgaaccccggtctcctgcgtgcaaggcagggataatcccgttatactaacagcccaaaatatcgactgggtttaatgactccagcccgtcaaggggcagcataagcttgccctccaccactcggtttacgtccgagaacgtttcccctgacaggaagaaaattggacccgccgacaggattcgaacctgcattagctatctctagccagctccagttaccttagtcagagttcgtagctctgcggggtacgacgggatgaaactgtttggagtccggagccagaatcgaactggcacctcatggctttgcaggccagcgcattagccgttttgctatccggacgcgaattttggtctccccggttggattcgaaccaacgaccactcggttccaaaccgagtactctaccaggctgagctacgaagagacagataaaacttggcacggcatgaaggactcgaaccctcactaagggatttggagtcccgtgtgctgccattacactaatgccgtgtagaaagattacgtcaaaggctagtcgatagacacgccttggagctaacctctcaaaaccgctcgagttttggaagagctcgttcaccgcctcgttgcgttgaacgttactgcatgagagttagtatgcaccaactctttttcttgtgtacctcggattctttgctgaatcccttctggacgttaccagctccaggagacagtgttgagcttgagcgtcaacacattgagaagaaaacttagccccatcgccggcggataagaaccgaatccgtcgatgaagtcgatcaccttgtagattacgttcacataatgtcctcgcgttgttcgtctgtgttcaactgctgaatcattatgctatgtgatgatcttttcttgccaaccttttcgtgcgataaagaaaaacccaggattcctttcgggtcctgggtcagaagtttctcgattgagtttactactcaaccatctcccatcccagtatgacgacccggttcaaagccgcgcacgatatctgcaggcttgcaattggcttgcaggctccagagtgtcgtataggcggttggatgagaggttcttttcatgtttgtatttacagcagaattctcaatttccggtgagagatagaaacaagtccttcaattcggcgattgcttcgtcgagatttgtgtgaacattcaggttcgctacctcacatgcgatgcgcgcgttgtggaaatgcgaatagcccgggtcgatacagacaaccgtgttgcctacgcgaccttcgtccattgcaagaccgagctcaagcatcacagtcggagacttcgcatccgccgggatgtagatgaaagcaaactcgctgttctgcagcgactcaaactcccacttgatatgctcgttcttctcttcgcgagtcggttcagtgacgtcccagtctgggcggcaggtgttgacaagcacaacgtcaaagacgtcagcaaatgctgcacctaccttctgctgccaatcgcccttggcggtgctgccgccaaggaagatagtgttgaacagacctacgtgggctgggtaatatgcgtatgtcatagctgggatgctaccttgatcttgagtgattcgattgcgtcctcgatcttgtcgaagaggcggacgttctgacggcgacacatgacctcgatgttgccgcggcgatagaatccctgctcaacacagatggtcagcttgcctggataacttgccatgatgcgaccaaactcgaggaggctgatcggcgctttggattctgccgagatgaacatgaggatctcggaagccgcatccatcatgtctagctcccactcaacctgcgctcggaattgcaggtcagtgtctatctgcttccaagacgaatcccagtcatcgcgtcgtgggttgaggatggtcaccgggaagtattcaaactcgcgctcaacgcgggtctgccaattgatggcctgacccatatcgatggagcctgcgagaaaaattgccggcggaaagattgggctcctatagcggagcggcgccatgattactttcatcagcacaccgtagaggatgcaatccagaacgtctctggatagtgagggcgatgaccgcgatagctgaggtcacaggcgaccgctacgtcgtagagcatctcatcgatctcaacagcggcatcgtagctgttctgcgggtatgtcaacatcgcagcaaagccgttcagctctgcgacgagagcttcacggcgtttggtgacctggcggagctcttcgactcgcgccaggatttctttcttagcaacatcgttgctcattagcaagtgctcgggacccagaactcgatcgcgtcgcccggctcccagccttcccagctgtcgtaaccgccgttccattccatgcccagcgtgtaggcgaggtcatgtagctgatcggtgatttcttcgacgagcgcttcgtcgtcttcctgatcatcctcgagctccgggaggttgatcgaagcggtacggatagcctcagtgacagcgtccttgcgacggttcagctcaccctcaagtgtgctgatttctgcgagctgcggggcgagaccttcgatggtggtcttgattacttcgagacgattactcatgttgattccttagcaggtagagggaagccaaaagccgttgttgggaccgccagtaacatagcgacccgcagatgcgatgtcgtagcggattacgtagaagcgatcgttcacttcgtcctcggcgtcgaagagtgcgtcttcgtcttccgggtcgatgttggcagtcgcggtggcgatcattgccttaaggtcgacagatgccatgagcgcgttagcctcattgtagagctgccggatcacgcccatctttgcgacgagctcttcagccttcttttcgaaggtctcgatatcggtgatcttgtccattagtagcaggtactcggcagccacatgccctgacccagggtgaactccgcgctgaacggcgatgccagatcatagccaaagtcgtaagcagcatttgtctgctcgcgggtgaggttcttcatgtccagcttggtgatcagctcgtcggcttcggcgaacagctcgtcgataattgccagacgctcgaccagtgctttggaacgctcttcaaaggtcacaaaatcaatcttgtcgctcattacaaactcctcatggataaatggtaggctaggtcggactcgaaccgacaagagccgcaggttttaaatctgctgactgttccgatttgtcttggccactagcccgctgtcgttacgtgatcaatgttaacgatgaatcttgccgaggttccgtattcttggaactgtatctgtccgatggatgcgagccgcagcgtgtctgcgaagttttcagcgaaccactctgctatacgcgcgacaagtggcttgtctgacttcttcaagatgaccatcttcttcgtgttcttgacgatgaagtattgctgttggttccaatcttcctcgacaaacatcacgccttgtagccactcgccaagcatctgacgaacgactttcgtgtactcgacgcacacagggcagcgcgagtcgtaatcctcgcgatggataatttcgggcttgaaaccgacagttagacggtcagctcgtggtgtctgatagaacactccgatgacgtctgtttcctcagtcagtgaaactatcgtgcctctgccgtgtagattgtgcgtggacagcaatgccgatttaagggcctgttcgaacccctgctcaccgtcccagtagatgtagtactgaggctggggcgttatgctgacctcgttagaatgcagcatgcgaccacacagaccgcggtcctcgacctcagcctgtacgtgggcaaagatatacggcgatatccggtgagggaatgtccagtctggatcgagtttgtctgtttccaattcccaaacaaacgaacgggccactaaggacccgttcgtctggattaccggaaccgtgattcggttctgatatctgattttcattccaacgctgctgcctcgatcttgatgaggtcgtccagcgtgtcagccttcttcttgtccagtcggaccgagatgacacgcgggaggaacagggagaaagtatcgcgccccttggcggtgatgcgctcgttgtatcgcacggtgacgatttccggggtatcggtgagccaggtgtcgcggacgctatccgggaagtccttgaagatgcccacgtcacacttcacgcgaccgcattccgactcgatcaggagggcgcccacgcgcttttcgttcttagtgcccttcttgccgtactcgaatccagtgacgcggaattctgcctcaatctccgccttgaactttgcctggaacttcacgcgcttgccttcccacatcgcatcgcgcttcttgaggatcgtgccctcgagcccgttgcgccgcgcttccttgaagtgctcgtatgcctcagcatagctgttcacttcacgcgattcgatcgcgaccaccttgcccttgaaattctggacgtctgcgaaacgctcgtggtacgggcgagtcttgtcctcgaggtcccatgcaaccaggacgagcagctctgcgtctgcaggcgtgatcgtgcccttgatggccttgttcacgatgccgttgctggtcttgcggtcgaggcgcttgccatccttgaagcagaccagctcaccgtcgaggctgtcacctgcatggagattcttgcgcgcccaggcgttgaaggtaccgcagtgctcgatttcgttgtcagcccggctcgtcagggtcacgatgtcgccatcgaattccaggcggcagcgggcgccgtcttccttggtctgactgatcgccgggaagccgattgcttcctcatcgtagtcagccgagcagagcatgaacgcgggcttcgggatcagtccgggccagaccttgttggcggtgctggcggagcagccgatgcggaggtcgcccaggatgacgcgcttcacgacctcagcgtcttcgagctcgaggcgctggaagatgtgggtcaggaattcctgcgcttcgttgccggtcttcttgcgcgtgcagatgatcttctcgatctcatccagcgcggaatcgatcgtcatcatgttccggctaccatgcgtgccccacattgcaacgtcgggaatctggcgcgtccagaacaggaccttcttgtcgtatgccagtcggaggacgcgcttgagcgtctcgctgtcattttctctgaggacccgctccttgaacagcttgctgttatcgcttgccaccagggtgagaattgcgagaatcgtcttcatgttggtcctcagattgagatagggaggagcatccctgctccacgaaagtccttaggcgagctcaacttcaatgacacggaaatcacgttcacggatgtaaccgtcaccgaccgaatcttccggacgagcgacgtcgtatccgccaaacgaacgaatgcgcagacgctcttctccgctgcggtgagcatcgacaaggcggacagcctcattgatcgcatcacgctggttggtgtagagtgctgcatcgttgcgacgccaattacgacccggacggaattgaccgttgtttggggtataaaggcgcttggtcggaacatgttcaatagcataaagggtcattacaatttcctcaagaagtttctaatttggtcctttttaggaccaaattagtctagttgagtgcaacccagtgatccagggaacctagagactgttccgtaccttagtcctgtaccctagtaagatcagacacttacgtgggaccccttccgcagaaaaggccagtagattcagacacttacgcatctgaatctgaaatctggcctagggcctgggacttgggtcagcaggattagcgacgggcgaacggatggtcggcagtcgcgtctcggtactgtacgaactgcgccgtggtgtcgtcgagcatctgttcaagctcagcatcagagatccagctgcgcgcgtccttctcgccaacgatgttgtaaggcgcgtcccagcggtttccgtttcgcatgttgatcagctggaactcgtttgggttgacctgcgcgagcagatacttcgttccgtcgagaacgtattcacttccggcgaaatgcttcttcatgtgcggctccactcataggcacgctcgggcgcctcatttcctttcacgagaccatcgacccagttgttgaaaccttcgtcgaaggcaacagtatcggacggatgatattcctccttgagcatcgggaggatggattcgcggaagaactttcgcgcttcggcttgggtgttgaacacataacgacgacggctcataacgaaaagtttccttaggcgactgctccgattgtacggtattcgatctttttctgcagtaggatagcgttgttcatcgccaccttcatcgccggagtgatgccgaaatcgacatacacagcaacgatatctgcaacgcgcagccaactcaactgcgactgaagaccgatgtctcgctcaatcggatctttatcgttcaaaacggaatagaagaacagatgcgacgcgagtggcgcctcgttcttctggatagagtccttcgtggcgcgctgtgcatagcgcgacattttcaatgctagtgcagggtcctcagccatgaaaggcgtgatgaggatgacattacgacggggctgcttggtgacgcgaaggttgtcctcggcgcgggcagcctggatgacggacttgggcgtctgcacgccttttgccggtgtcgtctgaccggctggctctgttggcttctgtccaccggtctgatactcagtggacagaattttcttgactttatcgaacgggaccttggccatcgcaacacctcatgggatgcgatatttaaccctcggcgagatcgtagtacttgatctgcatcaggatccaattgatggcatccagccggacctgctcagacctgccttcccatcggctgtcaaggacgccttgttcccagtcaacgtccgtgaacggatatgcagatccgcccgattcgcgacctcggacgacacggttgtattcgccacacatcgcgaggaacacaccacattggttgcgatagggttcgccaatgttgggatgagcgtacaggaagcctgcgttgaaacagatgccgtagtagggcagcggcacctggcctttctcggcgcgaacagcgagtaggcgagtcagagcttcttcgaccagcgcgaagttttcagccttcgaccgacggtcacgcgggacgcacagtttcagcaattccttccggcgcgcgttgtatgcgcgctgatacttgcggttggtccaccacgccttgacattcgagatccaacccatcacttcatctcctgcgcagcgcgctcggtattgaggagcgcatggaccaacgggcgtgccgcttcgagcatgtcgtttgcgacgcgaattgccgccttgtttcggcggaggaactcgatcgtttcacggatcgtttcgtggtgcacggcggcaccaatcaactgcgcgttcgcagcttcgagcttttcaatcagttgcatggcaacctcgaaagaaggagcctggatatttctacccaggctccgttgttggtcaggcggtcttcacgacgtagaggttgtcgctgatccggctgcgggcgatgaacgggcgacccttcttgcagtccttcttcatccattcttccgggtccgcggcgatcgtgccgtccttgtactcgttcttgatgcccttgagcagcgcgaccttcgacttcttgtcgtcgatgttgtggatcgtcttgctcttgatctggaagccctggttggaattcgagaccatcttgatcaggcggctgtaccgcgtgtcgaagaggtagacgaccttcttgccgatgatcgggtggtttgcgaagggctcatccttcaccttttccaccttcgccttgggcggcttcggcgccctcggctccttcaccttcttcggcttcggatccggcgccgtcacgacttccgtcgtgggacgagctgcgcgcttgatgaccttcggctcgatgacctggctgttcgccggctcgagccccggctgcatcagcttgatgacagcgcggaaccactggctcatgtgcttcggatacgtctccgggtcttccttcatcgaagcgagctcgcgctcacatgcgtcgatgacgggtgccacggaatggttcgtgtccagcgtgaacttcggtgcctcgaacttgcctgctgcacatgcgccgtcgagtgcgtcgcagaaattgcggtagttggcgttttcggaattcttggtcgtcatggtcgttttcttcttacggttcggtttgatgttggaatcgacagcgggcatttccagcccgttcacgaatgagactaggtcgtcgaggagcttcttggagagcttcgcccctcggctgtcgattcgcatcaacgcaccgtaagtcaaaaacttccattcctgctgcaccgtcacgagctcaagtttagtggggatatttttcgtcacccactctacagcgtacttcttgagatcagacagccgtacacgatccggcgagtagtagttcagggccttgacgagctggagctgcgtcagttcctcttcaccaaattccggttcgttcccctttccccttgcgcgatccaaaagctcgttctggatcgcctgcttctggcgtttagccattaggcccctttgtgtgagtgttttcccgtgtggtccggaacccctaacagcccctgtccgctgaccacaatcacaatgtaataaaggtctcgtgaagaaacaatcttttcgtcacgagacctttacacctagtagccataagggttccagggccctcaccagcaagaatcaaggacttactgaggggcgatcaggtacctctggagggctgccacgcccgaaatgacggtacctttcgcatctatgaccacgggtacagatcgggcttccggggccttgacaagaagttcttctttcgtgtagtccacgcccagtttcaacacttcatgttgaaactttcgcattttgatcatcgcgattgcctgcacacactgagggcaatcttctttcgagtaaacagtcaacattgttcgtctttccttacagttgtggcagctctgcgtaattgatgttggtggtcatcacaccgatcacatagtcggtcgattccaactcttgtagcgcagtctgcttcgtttcttgcttcacatgcttgaggaaccacgggatgggatgcgacttcggtgcttcctctctgtatcgaatgccgatctcagcgagacgctcctttgcagtccaatcgacgaactggtgtaggatctttacgttcagtccgatgatcgcgccttccttgaacagatactccgcccagctcttctcctcagcgatgaccttagcatacaggtcataaacttcgtccgcgtacatgtctcggatagcagcgaactcagggtcctccttgcacatctgattcaacagccatgccgtccattcagtatgcagaagttcgtcttgcagaatgagtccgatgatcgtgccgttgccgatgaacagcttgttctccatcatcgcaaacgaagttgcgaagctgaccatgaagcggatggcctcgagcgcgtacgacgcgtgcatagcgagccagatagctgtcttgtgctccaggcgatcgacgtcttcacctgctgcctttcggcggttcagctcgtccagggcctcgtagtagtgcccgattgaagctgccatgtccacgatctcctgaatctggtgcgcctgatcgaagatctcacctgggttggagtacacgccgcgaatgatgtgactgtagctgttggagtggatgttcgtctcgaagaagccccagatggacagcagcgattccatctcaggtagtgacacgcatggtccgaagatttggagcggagccttaccctgcagactgtcaagcgttgtctgacggaggaggttactggtgaaggcgtgtcgacctgctggcgatgcgaccttcatgtcttgcttgtctttcgttacgtcgatctcttccggaacccaaaagaatccgcgctgggtcttctcatattgctggatcttcggatacttgaccttatcgaatcgctgcattgtgacgccaccagcgtcatcgaggaacatgcggcgctcaaggtagttggtttctttactgatatcaaactggctcattctttaccttcatcaattcttgttcgcgacggtgaatctcttccattgcgtccatcaggcgcttcaagtcgtcttctgtccactcaggcggcggagtcccgggtggcccaattgggcagccgaagctcccaattggaatatcccatacgtcatctggatcgatcatagtacgcaactcgagcaagactcgccctcctcgactacaacctcttccacctttgcctcttcgtccttcgcgccgcgcttgttcaacagcgagtagtacagtgtcttgccgccccagcggtggaatagcatgatgttcttagcaatcagcgtgccaggaaccttcttgccttcgtagttcgcaggattgtagaacgtgttcgtgctgagcgactggtcagtgaaggcctggatgagtgctgctgtcttaaggtactcaacacaatcttcctgatcccacatcaactggtagtagtccttgagcttctcatatcctggagcaacctggatgagcgagccacccttcgattccttggtcgtgatgagagccttaaggagctccatgccgtttgtcgcatcaacaacaaccgacgagctttcgactggcgctgtggcattgagcagaccgttacgcacgccatactgcttggcgaggtcgcgtaggcgctgccaatccagcgtcagcttgatctcgtacacctcatcgaagtttctgttgcggcggtcaatcggaagaatgccgtctgcatagtacgtcgacttccactcgcgacatggaccgcgttcctgcgcgagctcaattgaagcctcgaggcagtagtagttgatgtgctccatccacaggttgagctctgcgagcgcttccggcgaaccatacttgagcttgcgctgcgcgtgccagtgagcaaggtcagtgataccaatgcccagcggacggaagtcttcgttcgcttcgcttgcctgcaccgacagataagtctggtaggtgagcaggttgtcgaggctgcgaacaagcgtacggcatgcttcacgcaggtcagtcggcttcttgaacttaccgagtaccaacgaaccgagcgtgcagagcgcgatgcgtcctgttggatcttcgaggcgctggaacggcgaggtcgggagcagaatttcctgacacagattggactggtagatcgggaacaggtgagccttgataggaccctggttgatcacgttgtccatgaacatgtggtagatgcgtcccgtgtccgagcgttccgtgaggaatgcaccgaacgcgtctgctgcattcaacacacgcttgcggagaccatcctgcttctcgtacttctcgtagagacgaatgaactcttcctgatcgcggtagtacgcctcgtagaggtctggtacttcattcggatcgaagaaggtcatcggctcctggttacggaagcgattccacaggtaggcgttcgtgactacgctatagtcaaagtgtcgaacacggttctcttccgtaccttgattgttcttgagcacgatgagctcttcgaactcgtagtgccagattgggtaggtgagggttgcggatgagttgcgaataccgccttgtgagcagctacgcatgtctccgaaccacttcttgataaagagagtaaggccagtgtgagcgatctctccaccgcggattggagcgcctgcaggacggagtcgaccaatctcgagtccaattcctgctcgctttgcagagtacttagcgaccatctcgcctgtagcgaagatggagtcaagcgtatcgtctgatcgcagaaggacgcatgaggagaactgttccgttgtggtaccgagtccggcgagaacaggggtgggcagagtgaagtcgccattggatgcctgcttgtagtactcattcactcgcttgaggcgctgcttagcaggctcagcgtgcatagccgcagcggctgctacgatgtagcgcacctgcggggtttcgacatactcattcgtcgcgcggttgcggaccagatacttgtcaatcaactgctgtaccgcagcatacgataggcgctcatccttcgagtgatcgacgaacgtttcaatcaagttccactcatcctccgtgtaccactggagcagcttcggagtgtagagacccttctcgatgttgcgctggatgatcgagtaaagcgaagggacttcgtactgaccatagacttccttacggagagcatacgatgcaagacgacctgcgacatactggtaattggtgtgaccttcatcgctgaggataaggttcgctgctgctcggattgcgagcgtatcaatgtcactggtcttgatgccgtcgaacagctcaaggttcatgctcaattcgatcatcgactgcgagacgttcgcaatcccatcacaagcatattcaatctgacgctgaatttttgctacatcatacggctcacgcttgccgtttctcttcgtgacataaatctccttcctacccatccaaagtctcctaaaacaaaaagggcagattgcctgcccttggaaaatacgtgtctatatttaccacaagctatagtggtaagtctaatgtgaacaccactacgccaacaggcatgcgtggtatatgatcgaacctacaagatcggcaggttactcgtcggtcgacgtcgagccgagaaacgattcaaaggattcgatcgctacttcctcaaccatacgcatgccaccggaagtatgatggacaacatgccactttccagacttagcgcccttgatgacgctgtatttggagttagggttctttttctgcatggcttgcatgcgggcgtgcgcggcttgatgctccgcgtcttcaaacagggttgacataggctctggctcttgtgaagtccagatatttattctgggtggtaagagccgtacacgcaatgcaagagctcgtggccccaagtatggaccgcatcggtctttagggcgactggcttagtgacgtgaatttcgcattgacctggcaagtccttagaccaagccgcccagccgagaacttcgggctgatcagacttcttgaacttgtcgtatgcgcggttgaggtctgtataggtcggatgaaccacgaccttgatttgctgaatctgcgctgacctgtccatagtcggcagaatgggatcgccatgatgcggcggtgttgctgcctgctggcagcctgcgaggatgataaacgcagcacagagaaggagctttctcatacaaggagacctctgttggacgccttgtatttaatttctggtggttctagcagggttcgaacctgcgaccatcccttatgaggggagcggtttaccagctagcctatagaaccaaattggtgccgcaggtcggactcgaaccgacaaagacaggatattttgagtatccccgatctaccaattctctactgcggcggcggaacctaaggaggagagcgactcgtccctaggccctaatgacgaattaagcggctgtccttgcagacccttcgcggtcaggatgcagtccctctggctactcttgggtcgccgcaccacaagctcaacggtgctgcttcacctgtcagtccaataacgtaggactgtgtctcacttgctatcgtttgtggcactgtttggtgcatcctataggattcgaacctatgaccgcctgcgtgtcgagcaggtactctaccactgagttaaggatgcgttgtctgtgtatttattctgggaacacttcggagaggtcaacgcctacatgcttagcgatagcacgaagcagagcggtcttctcgtcgttgtcacagtggggctcgttgttgcgacgatcgtattcctttgcctcaatcaggagcctcttaaggagctccatctcgcgcttgagtgcttcaaactccgcgcgggtcactgctggcggagtaatgtaaggaagtgtctgcaccggtacttctttcgttggtgctgacgggataaaatctgggtaccgctctttccagtcacgggtgaagctgtcacctaccatcgacacgacacacattatcgcttactcgccaacggattgttgaacgggatgaactcgaccacaccgaggtctgcaccgcagatgtcgatcagttcggcgatgtccgagttgcgctccgggtcgttgtggaaccgactcttgagtgtgagctcgttcgtacaatcgaagatgaaattcatgctcgcgatcatgtgagtcggagcattctggaacaggttgtttccaccgaggacggagaacttgcacatccgtccatcagcgtcgatgaccaagaacttactcgtggtcaccggcttcacaaagttatcaatggtgcgcataacgaatctctttgcttagttgtcgtcctggatcatcagcttgccagtgcgttcctcatgacgattcttcatcgtcgtccagcggaactcgatcgtcacggtgtcaccgtggttggagagctctgcggtggcatcgaggatctcgagctgctcatcctgacgagcatggcgcgagctgaaatgaccgtggatgaattccgagagggagctaatgtcttccttctcgccgtttactgccttggcaattgccttcgcatctggccaacggagtttgacgccttccttccagtttgcgctgccgaccttgacagcgaacgtgccacctgcggtggactcagccagatattcttcgaattgcatgtgattgccttatgggttgatgtccaggtatttagcctggacaccgaaatcgaggaccccagtgaggaacacagaaggggtcgggtctgtgcgattaggcgtagcgagctactgcgtaatcggcgtcgttagctgcgacatttatgctagttgcatcttgatttacttgagtggatactctcaagagtggtctgctcatttctaattacccgcctgtcgaaacctgggcaggcccatcaaaagcatactcgctgcggcgctcacgttctcttactcttgcccgcatgatccatcttgccgggcaccgaagaacgatccgccccgactaggatcaacccgctaaggtgatcaaatacgcttttggtggacctggcgggaatcgaacccgcgtccaaacgacctttcgattggcttcataccaccatattttactacttatttcttaccagtctccggatgctccacctcacatcggaccacaaaagccacggttcgaagatgtctcttccaaaccaccgagtgctgcgatctgttcatccgtcagcaacaccttcaggcggtgccaatcggtttcagatatttcgtaccaagtccgacccctaaacggtggatcaatcattggctggtacttccgttcgaccttcatctttatctcccctacaaccaatatgctataggtgagtcttttctggtcaaccgtcgatttgctctgctacgtctgggtcgctaagaaaaattccaatgtttacccaatccgctgggtccgaaatatcgagaccagcatcagcgagaatgtcgtacaggtactcgtcgcggttaggcattaccactttccttcgggacatgttgcgttgacgagcttagacttcgcaggcatgaagcagccacacttgccacaggtgagtacaacggagttgaaaaacggacaagtacgacagatgtcgtagcggcgattggcttcccgaccatccgagaagttgcccgctagagcatccttgataccatcagtgaaagtgtaggtcatggcttatccaaacaatagtagagctgcgaccagtttcgcatcttgtgcatagtcagagtcgaggatgatcgcgttcctctctgcgcgcgtgatgttaaatggctcaaagatgccaatgtgtagagccagaggctccttcatctgatagcctgtatccagaacgtgaatgatgtactcacggtccgttggcttgagctcttgtttctcgttcgtaatcatctagccagactcctagctgcccgctgtctgggttgcggtaaacggtagcgatttgcataccaccacaaggtccacagaagcgaggctgctgcgtcatcagaacggactccctgtttgcaagcaggaagtccacgatctgttctcttaggcgctcaattctcgccatgcgtctaccatgcggtgctcatactgacgaccgagcttgacaagcgttgcttcatcaaagccgtagatgccaacattagcccagaacttcggcgtcgaggcgcgaatgttcatgccaaagctgtcaccatccttgacgatctcaatcatgatgtcgccgttggtggaacacttcggcgacccgtacttcgccttgcgggtccagacaagcgtgtcggactctactgggacagttgtctccagcttaaaatcttccttgcggagccataccaggtaggcggcatcttcaggaagcggaagctcattcactttttcttctgtactcatgttcaatccagttggttgtgtttctgtgtgagtatttacctcactcacgtccaccgtatgcgtagaacatgtcgacgaagagttctgccatagccttttcactgcgccagcgagtcgggcgagaatcgaagcctggccaacgtggggtgttttcatactcaggggaccaatttctcttcgagttttctttgagggcgtcgcgttcggtcaggagcatgatgcggtcagcttccttcacctcaggcgagagctcaaacggaacattgaaccgagatgcgatagcagcccacaggttgtcctcgagagttttgtactcagggatcatccgcttgaacggcgtcggaatgtcgcacaggtatgcttccgttgcgtcatgcagcaaaccctggagctggtgcggcttcgggagaatgtaggcgacgttgagcgagtgctcagcgaccgaatagaacctgtctacatgacctgcaaagcggcatgcgtgcgacagcgcgtgggcgatgtcttcaatgcagatggattccggatcggggtcaggcatgtaaaggtcacgcccggaccacgtctcgatatagtcacgcttgatcattgatttctcatagtgagttcgtgttgctaatctacaggacggatctaactcaccgcacctgtctcagatactggataaagaaaaagggacccgaaggtccccttgtctcagcacgaatggctggatgccatccactcgtcgctctctacccaaccacccattccatacgccggtccgctccagtaggcacgaacttcgtcggtggagagctttcgggcttcctcgagtgctgcgtcagcggtagcgaggagctcgtcgattttcttctgtcgttctttctgattcattacttgttttccttgatagccaaattccaaccaaaccacatggcgctaatgtcctcacgaacatagcctcccaggtcatctttctccatgagggttgccttgtcgaggaagtctcgcttgagccccatgaaaccgttgtcgcccttagtgattgcccgcaggaaatactcgcggtagacggcgtcttcgaattctgtctgtcccatcagcaattcgccgttgaggaccgccagcgaccgtgcccgaggtcgtcctcaatgtagacgctttcgccatgcaccgtgatggtcgctgcggtgtcgccggcgtccttcaagagctctttaatctcgtccatcttctgacggatctgatcttcgacgttgatgacattcgcccgagggtggagagtcgctgcgatgacgaggttattcgccatccagtcgagctcttcctcggtcacattaccagcttcgacgtctttgtgccacaggtcgtatgtgtagccagaggtcgaggagaacaggttggtcgcgcgttgcgcgagctggttagctcgcttgcgcgtgaggggcgcttgtgtggtcatcaatcctccgaagcttcccacgaagccgaccagtcgtgcgaatcgagaatgtagacggtgtcagagctcacttcaatgtgaaccgactcgtcaccatagagctcgaccagctggacgatttcattcacgcgcttctgtacttcagcacggagctcaattccagacttggggcgctgcattaccgctcctccacgatgcaatcagcaaacgcgcgcacgaagcgaccgttagcctggttgcggaatgcgatgccgtcaccgtccagctgcatcaccttaccagtggacacgaaagtcttgatgacctgtccgccagagtagcacgtgatgtcagcctggtcaccgtaggcgaacagcgaggcgcgttctgcgtcggtacaaccggcgagagcaatgacagcgacaagggcgattgcgatgatcttcttcattttcatttctcagttagcaccaggaacgttcccagttgttggagtgttctgcgccgatgacgtagttgtcgtcctcgtcgtaggattcgatgatgatcttgtaatcaacaccttcgagttctgcgaacatctcgcccagctcgttgatagctgccttgatgtcgcggatctgttgcgtgcggtcagacatagcctctttcctttgcgatcttgtggagttcgtcgatgtaatctttcagacccttaagggcgtcttggtattgctctttctgccacgggcgtgggaagctccatccgaagaacaaggatcgcttctcaatgttcctgtcaccgaagaaacggcgcctctgattgagggagatgacgatagcctcgccatcgtacgtctgaaccttcttcgtggtgatgtagtagccgttgcctagctcactgttatagaaaagcattagcagttcgccgatgaggaagaccaatacggcgattcgtaatctggtcggaggtcgtggtactcagtgtcgccgtagtcagcattgcaaaccgaggtcgaactgcgccagaagccagcgtcgagctggagcttgaactcttcgttgccgcgatagtcgccgaccttaacactgatctcggagagctggcctgctgcctgcatgagcttctggagctcctggagcttttctacgagcgtttctttgctgatcggttccattagtacaccaccgtttctttggagtagggcttcacatcaccacgctcaaccgcagcccagaagcggtcaacgtattcctgatcgtacatcgcgttcacttcgtcgaaattgtcccatgcgaacttgcggaaccatcccgatgtgatgctggtgcagaccttcgccagcgccgtgtcaaacgcctgcttgcgctgctcgtatgtcttaaggtcgaacggcacgatggcgcgctcgaggctcagcacatagctctcttccagaactgcgagcagctggattcggcgaggctgcgcgaagaactcttccttcgacgtaccgacttcctcgccgtcaggctggaagtagctgtaagccgggcgctccaggtgcttgaccgcgacgtggatgctgtcgtgatcgtagacgtaattgattccgtcgtcattgaagaaatccttcttcgtgacgccgccctcgagcttagggtgcttgtaattgtaggtccagcgcttccgttccttcaaccactcggtcaggcacttcggaatcttgtaacccagacccttgagcatctggatgtcgcgcatcgtcttgaggaagtggcgcgagtttttcttgtatttgtgactgaccttcagagccagcacaacgcccggagataccgcgagatatccatctgccgtacgggagtagagttcgttctcgatgacgagatcaatgagcgcctgcgaacacgatccgggccaggcgagctcaatgtcgaagatgacatcgtctttcctgaccggaaagaggtagacgtgatttgcgtcttcactgtggctgatctttccgaaacgtccagggttggacttcaagagggtcttcacgtcgtccatcgacgcgataaaatccaggtccaggttggggcgctcaacattgacgccatgatggcggagcgcgttcgaacccatgagcaggatgttggtcacgacaagtccttcaaggtgatgacaaggtagttggtgtagtcgctgctgtcgtagcgatcatagccgaggcagtcagtgtggatgtgctctgcgctgatctggaggtcttccagctgcaaaagtgttccacccggctttccgaaatgctcccgagccttgtcgagaatttcatccaagccaaccgaagagtagtgagcctcgatgtacagggtcttctcatcgttgtccggctcgaagcactggatccttgtgtcaggccagatgcctgtccctcgcgtatagtgtcccatctcgataaactccttacctgatgcgtatagtgtaacctggaacaatttctaggtcagagccaacggtcgaaaaactcatcgatccattcgggcttccaatcttctgcgtcatgcaagcccaggttgagaaccgggatgccatgttccattgcaatgcggatcgcagttgctgtgccacccagaagctcaccaccgatcgtccaacagacaagaaatttcacaggcgtcaggagatcggctccaaggacctgatggcaatttcgagcgtgagcagcacgagcgaaatcattacatgcgcgccaatgatcgacgtatcgctgtgcaacgatgaaagcatccttcgagggcagcagatcagacttgtgaccattgaatcctggctttggcagccagatctctgtcttgccagcttcactgatagcgccgcgttcgaagaaggaatcggctccatctgcaccgccagatacgagagtcgcattgtgctcgtatgccaggaatgctgctatttcaaacatcaatgatccaatggcttttggagtctttctacttccgattcctgcgtatctaaatgtcatttgataaactcaattgaaaatgcggtttgtggagtcacaccttggctatccgcaccgaaggtgtatgtgaaaatgcgtactttgcatcgccactcaaacttgtaatctgcttcccagcaggacgcggtgaacggcaacgccctatgattacaccttggtccctcgcgggattcacgccagacgatagcacgcagtttgtaatgcgctaccgtcacacctgttgctgtgttgcagagcaggtcatactttagatctctcgatccttattctcacttaccacacttccgacgattgctcgccctgtcactctatctcacgtcgcgactacgattagccgacggctagttgacagc

SEQ ID NO: 7 - DNA, 44425 bp, unidentified
  source 1..44425: mol_type = genomic DNA
cacgataggcgatgcaatggctctaatcgagaatgagggattgtccgactcgacggctttctgagggcgcatcaatctgttagttttcccaccagtgccaatggaggcacaacatacaaggctcgatcaatgccaatctcgaccgcacccagcgtaagcgccgcttctgccagttcacccggactgcaagcgtgatggacctgcgcaccacggagcatgaccgcaagcttgccgagcgcaagcgccaagccgaacgttacgaagcccgccacggaaccgctggaaagcgatctgtgtttgttgtcgagggcaacagcggtacgaaccgggcgaaccacgccgctgaccggagggcttacctgtgatccgattctacttcgccgcagggtacagccgcaacgccatggcaagccacgaacgggcaatggcgaagcatccgccgggcgctgtatcgaacctgcaatggaccggcgcacgctggacctatgacatcaagctcgctgcacccaccatccactgaatgcaagctactgggccttcgcaagagggcctagtgtcgtgcaatcggcacggacccaacctgaagggaaccaccatggacatcatcaccggaagcgctgacatcaagcgcgccatcaagtcgatcaacaccgcccgcaccaagctggtggaccagattcagcaggccgcgattgcggtcatcaaccatgcacacatacacggcgacgttacgcttgcctccgatctgtgtctcgccgtgggcaacggcatgaagcatgaggccctgcgcctgtacctgtccgagttcggcccgatggctccgaacgacgacaaggaaaccaaggcgagcgcgccgatgaagtttgccaagagcaagcgcgtcgagggcgaagctctggccgaaatgctggaacgtgccgtcgcgaaggcgtggtacgacttcaagaccgagaagcccgccgaggcgttctccttcgccgccgacctgcacaagctgctgggccgtctggaaaaggcgaccgagggcggttatgtcccgaccgaggaagaacaggccgtcatcaacgctgcccgcgccgtgcccaagcctgccaaggtgaaggcgactgcgtgatggaagccgggaccgtcgttgtatccaagcacacggccctgttccgcctgactggcggcaaggaatacaccgtagtcgaggtggtcccgagcgtcacgatggagaacggattcacctttcccgaatactgggtggttgtcgatgacttcggcgaccgcacagccttccacacccaccgattcaaggagccatgatggaacccaagatcaacttgcgagtgacccagcgcgaagcgtccctgctgcgtgctgccctgcacattgcctgtgcgctgaccgccaaagcgcagccgtatgctcgcaaagacctcgccgacgagttctccactctgcacggtgagctgcgagacttcggaatcgagagcttcgaccgtgacggtatcctgcaattcgaggacgacgttatcgcggcctgccgggacagcaatgccgaggcgcagctgctgcgtgacctgttcgcaccgccgacgttcaccgtgggctacggcatgcgtgaacttgacttcgctgctatcgaggcgcgggtgatggcgtgcctgctgtctccgttgcctccggtggtgttggatgcctcgcagctggacttcctcggcagcgtgaccggccgcatggtgttgcccggcccggcaatgcccgacaacctgccgcgtaagctgccggatgtactgatggacgatcagagcgcacgccacgtggccctgaccgcatcgcagaccgggctggtcaacaagccgcaggccaagggctggatcgtgcagttcaatctgcgccacggcggcatcgcccttgccaactgggcacaggtgcgtgagctgggcctgccgcagcgcagccgcaatgcagcgtaccgcatgctgaaggcgcgggccaaggcgcagggtatcagcgaggatgcgtaccgtgtggtgccggaaggtactcccgatggcccggagaaggatcgcggcttctacaccgccgagttcttcaccaagcacgccgcccgtcagtcgcagctgggatggaacacgtccagcgtgactggtctcaacggaacgttcaccactgcgcaagctgcacgcaatgccatcgctgcgcacgtcggcaacgatgcgaaccgtctgcgacgctaccgagtgaagtggcacccgaaccacgcgtgatctaccgctgcgccttctaacgagggcgtagctttggaaccacgcccaacaggagggcatattgcatgatccctatcgtctacaagcgcatccgtagtgggaagcgcaagccgttgcagttggcagagaagccgcgcaactggaaagagttcgtgacctatgagcacagcgtggagcgctggtatgcgtgaggtcatgctcgcttacaaacgagagattgcggtactgcgtgacggtgtgctcaccgagtacgagtaccctttgactctcaaccgagagcaggcgcagaccacggtcgatacgtgggagcgctatgtcaagggagccatctgctccatcaccgaagtcgaaatcccacccgtcaatgaggagaaccaccatgcgtaagctgtacttcatcgcttcgatcccggccaccgcgaaggatggcgtcatcactggcgtcgtcgccaatggcacgggccgcaacgccaccgccgaggaagtgacggcactggtcgagctgctgcgcaccaagggcgcaacgcagtccctgctggacagcctgcgcgacgccacctatcccggcccggtgtccgccttcgagcgccgtgccggtgcccgtgccgaggccgacatcctgaactccttcaacggcggtggtctgttcaactggcacatcatcgaagtgggcgatagcatccgcaagccggtgcgcaagccgctgggttggcgcatcatgtacgacacggactacaccagctgctacaactccgtcgaaaacggcgcaacggtgcgcgtcgatggtgacgaggagaacaacagcgaggacaacctgctgttcccgactcgcgccgccgcccgcaacgtcatcgatacttgcatcggtgacaagcgcagcaagcagaatccctcgggctactacatcgaggcggtgtatgcgtaaactctggctgcgtatcctgatcctgctgtactggatcgtgggtcgtggaccgtgggttgtcgtcgggcagtaccatgacgacgacggtaggctgtgccggttccgcaccggcccggcctccaccgggttctcgctgacgttcgatgacctcgacgcagccaacgactactgcaatcagcgcaactggcaggcagagaccgacccgctcggcaccacgtactacgtgtggcatgagacggagttcaatcacttcggaacgaggaggaagtaaccatgggtttcatggacaagatcaaggcagctgccaagtacgtcaaggacaaggtgatcgcagcggtgaagccgcagcacgacgacgatgacacgccgccgcccgcaccggacaccagccggtacctgcacgtcagcgtgcctctgattcccatcgacaacccggtgctgcgcaagatgctggggcaggattacttccccgtgcagcgtggtcagggtcagacccggatcgtcggcaacaaccagctgaagcgcgtggcctatagcctcggcggcaacaacaaggaacgccgcaagctgcgctcccgcatgaagcgccgagctgccgagctgcgtgccggtgcatcgttgcagccgaacgtgcaggccgcactggcaggtgccgcatgagcctgtgcatgggaagctgggtcgaggtgaccgtgcccgatagccgactgctcaacgtgcagccggagattgccgccgccgtcaagctgatcggtggtgcgaccatgaccaatggccgcggcctgtacgtccgcaaggacaccggcgcactggacgacgaggcggtgaccgtgatccgcttcgacatgaacttgcagagcgagctggtggaccaatacatgagcgcgatccgcgcaatcgtggaccgcctgctggtgctcggcgaggagagtgtgctgcgccgtcgcttctacaacatgggcggcgggtacaacagcgagttgatcttccagtaagaggaggcgcgatgcgtatcagggacggcccgacgtaacgcccaccaattattgaggatcgttgggagcgcccgcctcccttaattaacgggcaccatcactacatcaaccgtcaagaggaaccatctacatgtcgaacgaaaacaccaccgagcagaccaccatcagccactacgaagccaagcgctccgagctgctggaagacatcgccaaggcgcaggccaaggtcgatggcctgaacgagaagctcgccaagctggatgccgtcgaggccaacagcgccgccatcgaagcgctgaaggcgggcgatgccgtgtcctacctgttcggtcgtgccctgaacaagcgcgtcctgtccggcgtgatcgtcgccaccggcaagaacgacaagggcgtgctgcaactgaaggtgcagaccggcgaaggtctggatgccgagctgaacctgatcgacagcagcgccctgctgatgtcggccgaagaagtgctgaaggcgcaggaagaaatcgacgccgccgttgccgaggcacagcgcctcgccgccgaagctgccgccgccaaggctgctgccggtgaaggcgggcagtcgtgagcctgtccagcccggccccggtcagtgcgtcggtcaagcgcggcgacgagctgaagcccggcaccaccgcgtacctgatcgacacccggcagaccaacaagctgaccaagggcacgccgttcgtggtgtccaagctgaccagcgagtcgggtgaccggcttatcgtcagcaccgatggcaacggctccgtgctgtacgccaccgacaacgacatcttcgaggtgttcgagtaatcaagcgaggatagcatgagcgagacccttcccgacagcgattggctgcaccatgcggagcgactacaggtcggccaccgcacccgagtgccgcatgattgcggggaagggactcccttgcttatcactcgggagcatgacaagtccaccgcattctgtttcaggtgcggtggcacaggattcaagcgtgagcacgagagtatagaggccaagcttgcacgaatccacgccgagcagacgagcgaacgcagagtgcgtgcgactgttgagttgccagagccacgggtatacgacacccgcgagtggccgctcgacgccaaggtgtggttctttaagatgggactctcgcttcagatgatcgacaagctgcggctgtactggtgcccgagcattgggcgggtggtactaccgatcactgaaggcgacgacgttgtgtactggacagcacgaagcacaagccgtcagcccaaatggctgactcctgatgtgccgaaggatgggcttgtcgcacgctatggcgtgggcaagggggacaccatcgtgctatgcgaagacccgctctccgcattcaaggtaggccagtgcactgaggcgtggtcgttgctcggcaccaagctgcacaacaaagtgttaaagcagctgactgatcgaggccaacgtgtagcgacgtggctcgatgacgacagaggtagaagcaacggtagcaatcccggccaagacagcgcgcgagtaatcgctgcgcgtctacgtgcgtttggtctggactatcgaaacatcacgtcaccacgtgacccgaagtattacccgaccgactacatagaggagaaactacgtggctgagaagaagattgtgtactacaaggaccacatcggacgcccgccaaccgtgggtttccgtgcgatggtgtccggcgtgacagggcattaccgcagcgagttgaacggcgaggactgcatcacctcggtggtgatcttcgtgcgtgagccgggcaggttcgagacgaagaactcgatctaccagcagctcgcaccaacgaagtacgaacacgaggaggaacctgatgagtcttgacaccacgctgctgcggttgtgcactaaccgtggcaagttcgaccggctggtacccagcgcaccccgtgatgggctggacgagctgaccgtgctgatgctcgatgcgttgcgtgcgtactacaaggagttcccggacacgaaggacttgccgttcgacgtgttcgatggctgggccatggagttcaagtggaagacgcagcccgatgacaagaagtccctgctgaaagttctgctgaagcagatgcgcgagccggtcccgcccgaagcagagcagggcatgatcgagaagctgttggagttggagcttgccaccactgcggtcagcaagatcgtgcagtggaatggcggcgcagagttcagcctgcgcgacgagctttacgctttggccgagacgatcaccgaccgtatggatcgcaaggcgcggctcccgctggtgcaggagactcccgaggagctgatgcagatggacgagcacgacatcggcatccacttccgactgcccacactggcgaagaacctgcgcgccctgcgtggtggtgacttcggcatctacgccatgcgtcctgacgcaggcaagaccacgttcctgaccagcgagtccagccactggatcacgcagctcgacaacgtgtggcccgaccagaagcgcaccggtatctggctcaacaacgaagggccgggcaagcgcatcaagcagcggtggtatcagtcgttgctcggtgctaccatccccgagatggtggagtgggcgaaggacggcagcatccgcaagcggatcgaggatgcgatgggtggtgacctccaccgcatgcagttctacgacatccacggattcaactccggcgaagtcgaagcgatcatcaagcagaccaaccccggcttcatcatcttcgacatgatcgacaacatcacgttcaccggtggcatgaccaacggagggcagcgtaccgatcagatgctcgaagcgatgtaccaagccgcgcgtaactggtgcgtcaagtacgacgcagtgggcgtggcgacatcgcagatcagcgccgaaggtgaaggcattcagtacccgccgcagtccgcactgaaggacagcaagacgggcaagcagggtgcgtgcgacttcatcatcatgggcggcaagctcaacgacccggcgatggaacgcttccgctacatcggcactcccaagaacaagctgcaccgcgcaggcggtaagcgtgacgttcgtgaggaagtgatgatggatgccgagcgtgcccgcttctatcaggaggcagcatgagtagcacgaaggtggaggtgcacgggcatcgtgtgttcttgcccggcatccagaaaggattcgacacggtgtccagcagtcaggccaactaccttgcgtctgtcgtgagggatgcagtcaacgctgcgtacatcgaaggccgcaacgatgctccgcaatggaagtggggatggttgcgcaacaagcacagcacttggatcggcgtgcactactcgccgcacaacaagcgctggtgcatcaacctgatcccgtgcttcacgctgtggatcaccaagcccggaggtaacacgccgtgagtaccgaaccgaacatctacctgccgcgcaacgttggcgtcataacgtccagtcgcactggcagcagctacaccgtcgagccgcccgtgaccgacacggacatcgacttcctcgtgctggttcaggacttccacgaggccatcgccaagctggtcgagcagggctggaccctgtgctccggtgccgatgggcactacgaggaagacgaggactacagcaccacgtggtacgccctgcgcaacggcgtgttcaacgtcatggtgaccgccgactccgactggtatcagcgcgcggtcgaggccaccaccatctgcaagcgtcgcaacatcaaggacaagcaggaccgtatcatcgtgttccgctgggtgcgcgatgggctggacttggatggtgacccgtcggatgaaatgtaccagctggccctgcaacggtggccgctgtgagcttcacttccttcgacctcgaaaccacgatccgttccatcctgaagcgcaaggccaatccgttctacgacatgaacaagatcgtggcgattggctacaagcggaagggtgacgcacggaacaccggcctgtactacgacacccgtgtcggcatcgacaaccagtacatgggcggcgcgcccgatgggtggctgcgtgagctgtgctacgggcagcagttcctcgtcgggttcaacatcaagttcgacatcctgcacgccatctgccaaggcccgctcaatcggcaggcatggatcgagttcatcgacggcggtggcatggtgtgggactgccagcttgcggagtacctgctgcacggcatgacgcaagagttccacatggcgagcatggacgagacggctccccgctacggcggcaacctgaaggacgatgcagtcaagtccctgtgggctgcgggcgtggacacctgcgacatcgacaagacgctgctgatggattacctcctcggcaccaacgacaccgacgacgtgggcgacatcggcaacaccgagaagatgttcctcggtcagctcgctgccttccgtgcacgtggtggcctgcgctcggcgctgctcaacatgggcgcactgtgcttcaccatcgaagccgagtacaacggcatgtacgtggacaaggactgggcgcttgcgaaggcgaaggagttggaggtcgagcttgcaacggcgaccgccgaactcaacggcttcatccccgagttgcccgaggatctgaccttcaactggaacagccgcttccacaagagcgcgctgatcttcggcggcaaggtgaagtacacggccaaggttccgatcatgtccaccgagggcggccccacgtacgtgcagaaggacgaggtgcactacgtgctggtcgatggaaccacgacggcaacgccaccggccgaagacttcgacaacctgtggcgctacaccacctacggcagcggcaagaacaagggcgagtacaagaccaagaaggttaaggtcgatgacttgaccaagcagaagttccgcaacgaggacatgctgttcgagttccccggatacaccgagccggatgctgcgtgggaaagcaagagcgatcccggtgtgtactccaccgccgccgacgtgatcgaggcgctgggctaccgcaacctgccgttcaccaaggcgcttgcccgccgcgccgacatccacaaggacttgtccacgtactacatcacgacggacgagaagaccggcgagcagaagggcatgctcacgctggtgggaccggatggcgtcatccaccacaagctcaacatgaccaacacggtgaccggacgcctgtcatccagcgacccgaacttgcagaacgtgagcaagggtgagctggacgaggagacgttggaggagaagggttcgcagatcaagcgcgccttcgtgtctcggcacaagggtggcaagatcatccagtcggactacacctccctcgaaatctacgtgcaggcaatcctcaccgagtgccgtcagctgatcgaggacttgaagaagggcctcgacatgcactgcttgcgtgcagagcaggcgtggggcgagcaaggcaagtacgactacgacttcatcctgaaggcgagcaaggacgacaagcatcccgagcacaagaagtggaagaagaagcgcggcaacgcgaaagtgttctccttccagcgtgcgtacggtgcgggcgtggcgaagatcgctgcgaccaccggcatgtcggaggaagaagtcgaggcgctggtgcgcggtgaggccgagcgttacccggagctgggcgagtacatcgaccgcatggtcgagcacatcaagcgcaaccgcgtcagcactcagcgcttcgttccgcatcccaacgcggggcagcaaggcgtgccgcatgggctgacgtgtcagcttggccggtcgcactggaccacgccggacggcaagatgtattccttcagcgagtcaccgtccccggtgttcatcgccaacaagcccgcgagcaagggtggctgtgcgcagtcgttctcgcccacggaaataaagaactacccgatgcagggcaccggtggtgaatgggccaaggcggcgatgtacgtcagcctgcgcgccttctaccggaagtacgtaaccgaaccgaaggaatggttgggccgcgcgctgctcgtgaatcaggtgcacgatgccgtctacgtggatgcacacggcgacatcgcaaccaaggccgctgctctgctgcacgcctcgatgctggaagcgtcggtgtatatggagtggtggttcaactggacgctgccacttggcgtcccgtgtgaaaccaagatgggcgacaacatgatggaggagaagaaccctcccgcagagttcgccggtctggtcatcgagtaccgagcgtcgatccgcaaggacttcgttggtaatcacaacccgtcgtttgaataaggagaacaacacgcatgagtcttgacgcactgttgaacaaggtcgccacgcagggcaaggatcagtcggttgccagtggtggcagcttcgactacaccccgcccgctgcgggtgtgaccaccgcccgcatcgtcgggtactacgagctgggcaagcacgagttcgagttcgagggcaagaagaagacgcaggatgaagtcgccatcgtgttcgagctgaccggaaagcagcacccgcacatcgacacggacaacggtccggtgccggtgcgcatgacgctgaccctcggcctgtccaccaacgagaaggcgcactacttcaaaatcttcagccgcctgcgcaccgaggagcgacatttcgtgcagctgctgggtcagggtgtgctgctggaagtcatccacaagccgggcaagcgcgacccgaacaagaccttcgccgaaatcgacaaggcttccatccgcaagccggtcatgccggtgccggaaatggagaacggtatccccaccggcaagttcgtggacaccgtgatcccggtaccgcagcagatcaccccgctgggtgcgttcgtgtgggacttcgccgatgccgacatgtgggacagcatttacatccccggcgagtacccggagcgcaaggacgagaagaccggcaaggtcactcacgaagcgcagtcgaagaacaagacgcagctgcgcatcgctgcggcgctgaacttcaagggcctgccgtgctacgactacgccgccgctaagttggcgggcagcacgacggtcaccaaggaaggcgtcgatgcgctggacgaagtgatcggcgacgtggcgaacgctgcgcctaccgacgctgctccggctgacgacaagccgccgttcccggtggatggcagcgacccgatggcaggcatcgcctgatggacctgagcgctctcatggcagcggccggtgagcgctccccgatgccggtgcaagtggtacgtcagcacaacccgcgcgtgatcgctcacgttgacggggactacatggcgtacttcgcggctggtagcgagaactgctcggcgggggatgcacgacgcaacgtgctctcccgctgcgcacagctgaagcatgtcagcggagcgggcaagatcgtcatgcacctgacgcacgccgcgtctaccaagggtgatcgcttcctcgctgctaccacgcagccgtatcagggtcagcgccaagcaggccgcaagcccaacaactgggcgttccttcgtgaatggatggagacatacgagggcgacgctttcactcccaaaatctggctgacccgtgaggccgatgacggcatcgcgtacgtcaacgagggtgcagcattgcaccacaacatcctgcacgtggtgcacagcgccgacaaggacatgcgaatgttctgcggcgtgcacgtagactgggacggctacgacatcaccgaggttccgctcggcgcttacgacatcgtgggcgagaacggattgcagtacggtcacaagtggttctggatgcagatgctccacggcgacaccgccgacaacattcccggcctaccgaaggtgggcaaggtgacagcggagcagctgctgttcgagacgaagaccaacctcgaagcggtgcagatcgtgagcggcaagtacagcgaagtgttgggtgccgactggcgcaagacattcgccgagcaagccgtgctgctgtggatgcggacggatcgtgacgcagaactgctcgacgtactgaagctcgacgtgttcgggccgaagctgaagcaggcgttctatgacctcgccgaggacgtgaacgagaagcgtgcaatcttggaggcatacaaagcatgaagcgactcactgcaacacaggtcaagctgctgcgcatcaagctcgcagcggagcaaggcaaccggtgctgtctctgtcagggacagttcggcctgaaggctccgctcgatccggtgctggaccatgaccacaagaccggcgctgtgcgcggggtgctccatcgcggatgcaactccctgctcggcaaggtcgagaacaacgcaggccggtacggcgtgcgcgacgtgttcgcattctgtgcgggcatccccaactacctgcggtcgcacctcaccaacatcacggggtacctgcatcctacctacaagaccgacgacgagaagcgtatcgctcgcaatgcgaaagcgcgaaagcgtcgggctatcaacaaggagacaccgtgacccttacccagttcattcgccgagcaccgaagcgcggcccgaagattctctgcctcgacatcgagacgttccccatcgagttctatggctggggcatgttcaacaacaacttcagcgtcaagcagatcaagcgtgactggtcgctgatgtcgttcgcttgcgaatggctggacgacgaggcgtcgttctacatggaccagcgcaacgtgcgtgacgtgttcgatgatcgcaagcagggcaaggcgctgtgggcactgctcaacgccgccgacttcgtgctcgctcgcaatggcaagaagttcgacctgcgcaagatcaaggcgcgcctcgccatcctcggcttcccgcctgtgtccccggtgcaggtcatcgacccgatgctgttgaaccgcaccgagttcgccttcacctcgcagaagttggagtacaccaccggcgtgatcgtgccggagctgcgcaagtacgaccaccacaacttccccggcttcgatctttgggtggcctgcatgcagagcttgcccggcgcgtgggacgaatgcgaagcgtacaaccgcatcgacgtgaagtccatgaagttggagtacaagaagctgcgcggttggtactcgcagcatccgaacgtcgcagtgtactacaaggccgacggcagcgagcaccgctgcaacaagtgcggctgcaacgaaatgatcccgcaggatgatccggcccgcacgcaggtcggcacctacctcctgcttcagtgcactgtgtgcgacggctacagccgtggtcgtaagctcacgaccagcgccgaagcgcgcaagcacatcaccgtcccggcataaggaaccgacatgaagatcaccgacatccgcagcggcatgcgggtacagtacatcggcaatgctcccgcaatgatcgggctgcgtggacaggtaagccgtgtgttcgctcgtgatgtcgaggtcttcttcgacggccgagtgaagccgagctactgcgttcccgattccctacgacagctcctgagcatcggaggtgtgaccaccaccagacgagaggtacccatgcccgaactgaactaccgcgacgaggaccgtcgcacactgtccgaccgtggcgtcggcctgaaggatgacggtggcaagccgcaggcccggctgctgcatgagggcgtgccccgtgcactggcccgcgtcatcgacacactgaccttcggtgcgcagaagtacaaggcgcattcgtggcagcacgtcgagaaggcgctcgaacgctatcaggatgcgagctaccggcacgacaacaagcgctgcctcggcgagaagctggacccggagacgggcatccaccaccgggcgcaccacatcatcaacgagctgttcctgttggagctggaactgcgcgaggaggagaaggcccgtggcgcagagtaaggcgcgctccatcaaagaggcttgggtgaacatcggcatcggctacagcatcaactacgcagcgaacatcgcgctgctgccggtgctgtggcatcccgagcatccgctgctgtcggcgcacgccatcggcattgcgttcacagcaatcagcttcatccgccagtacatcatccgacgctggttcagcaagggtgactgatggcgtgcgcccgctgcggccaagtgcaccggtacgtcccacatgaggccgagtgggcgcgcttcctagaggagcaccgtacccgcaagcagttcgatgtcgagtgggccaactcgctctggcatcgtacctaccctgacgacgcgttctgcatcctagtgatgaagggcctcgcaggtttcgttccattcccgtcgaaggagaactgaatgctctacaagaaccagaccgccatgcttatcaagtcctacgagaacgccgttgcgtggggcgagagtgctgaccacgaggaggcgttgcagaacgcggtcaaggccgggttcccgaacctgcccgaggaagatcaggccgagctgtacacccgcatcgccgacgagtgggaaggctaccgcggctccctcgctccgcgcaagctgtggatcggcaccatcgtcaacaagttcatgtcggcccgcgttgcgcgcttcaacgctgcgctgggtgacggcaccaagaaggaggacagcgccgatgtttgatgtccctcgcaacaacgtccgggttgctcccggctacaagaagcgcaagcgtggcttcaagatcaaccgcgccttcaccaagggcaacttccgcgtgcagtggtacgacggaaaggccacgtactgggagcgctacgtcccgtggtacgcagtgccgctcgccatgttccagatttggagggaccacgcatgagctacatcgtccacaaggcggtcgagcaggacaagatcaagaagaagttgcggcctaccgaggagcagctgcgcaccgagtacatcgcacagccgaagtacgacgggtgcaacatggtcgccatcaagcgcggacactgggtgcccacggtgaacaagggcctgcacgccatcaaggtgggcgatgtgcagatgcagccggtggatcgtggcgtggttgacctgttctcccgcaccggcgagcaggtggtcagcgcgcaccacatcgagaacgctctcgcgtcggctccgttcttcccggtcggcgtgtacttcggtgaatactggcacccgcagatcgaccagcccaccgtcagcggcatgttccgcaagaaggatggaacgcagtacaccgagccgatgttcgtggtgttcgacttcgtgacgctggaagaatgggagcagggtttcagcgacctcgtgtatcaggagcgcgtcagccgcctgccgagcatgggccacgccatcgccgagggtactgctccggtgttctacgccgagtctcagggcttcctgatcgatcaagagctgggcagcatggaagcggcgaagctgctgtgcgagggcggcgcgtacgacgggctgatcctgcgcaagccgagcggcaagtgggtgaagggcgacaagggaaccaacggcgaagtagtcaagatcaagccgaccctgacgctggacctgcgcgtgagcaagatcaacatggctaccggcgagaagaccgggcgcgatgtctggaccgtggtggtggacctcggcgacggcaagacgcaggaggttggcagcggcgtgccgcacgactctgcaagtctgccggtcgtgggagacatcgtggaaatcgaagccctgtccttcagcaagtacggcctgctgcgcgagccgcgctacaagggcatccgccacgacaagaaggaggccgacctgtgagcgtcgaagtacaagcatggcacaacatggagcgcgacacagtggagcttcgcatcagcgtaccgttctacgagtacgccggttccttgtggccgaacgagactctgcgcgacaaggtgcaggaagcgttcgccaagttccttgacgagcggaggggctgatggacatccgattcggcaagcccgagctggacttctccggcgaccgcttcgctccctacggtggaggccatgtcacagtgaccgccaccgcgtggtgtggtagcgagcagttcttcaaccgtcagtgcatcccgagctacgaggtcggcggggatgcgtggccgcacatcatcaacgaaatgcacaccgcactggtctgcatgatcctgaagcgctacccgccgacggacttcaccatcaagcaacggaggtagcatgctctcgcaagtggaactcgaactggaaacctacgccttcggtaaggagcgcatggagaagtccatcgcccgcaacgaggagaagggcggcgcggacaacaacccctacgcccaagcagtgtaccgccggttcgtgcttccgcttgcggagcgcatccgtgcggacatcgactccccgcgcatcggtcgtgcccaagcgcacgtgccacttctacgcgccaagtatgaccccgagcgtcagaacaagcgtggacagcccgtcagcgccgaggaacaggcacgcgagtggtacgaggctgtggccttcgttgccgttcgtggtgcccttacctcctgcatgcgggacaagcacggcgaaggcagcgaccgcgacgtgctgaagaacgttggcatcaacgtgtaccacgagtacctgctgacgcagttcgcagacgctgagccgacgctgttctaccacctgatgaacgacatggaccgcaagctctctgtcaacgagaaccaccgaatgacggtgatgaagatgcagggccgcaagaacggcatcgagttcgtggagtgggggcaagcgcagcgcgatcaggtcggcgcgtacctgtgcgatcagctcgcccagttgggcatgttggagattggcgtagtaaccgagactgctgccagtgcaggcgcagcgtaccgcaagttccagaccaagactcacgtcaagatcgtgctgactgacgaggtgcgcaagctgattacgcagatcagcgactttgtgatcgaggccactccgttctacctgccgtgcgtcgagccgccgatggactgggtggacatcgacaacggcggattccacacgaaggaaatgcgccgactcaatccgtggatggtgaagacctacgctcagacccgcgacgagtaccgcgccgccgagctgcgcaacgagatggccgcgatcaacgcattgcagcgcgtgccgtggcgaatcaacaagcggctgatggaagccgtgtcggccatcgccaaggtgcacgacatggaggaaatcatttcgcaaggcgagctgccgaagccgcgcaagccagagtggctgacgaaggacatgaccaaggaaaccatgtcccacaatcaggagttggagttcaagcagtggaagcgcgacatgtccaactggcacaccggcgagcgcctgcggcagaacaagggcaatcgattctacaacgcaatgaaggtggcgcgcaagttcgccgagtacccgagcatctacttcgtgtacttcgctgacttccgtggccgcaagtacgtgcagacgaccggcgtgtcgccgcagggttcggacttgcagaaggcgctcttggagttcgccgatggtaagccgttgctgacgaaggacgcgaaggattggttctgcatcacaggagcaaaccgatggggatacgacaaggcgtctctgccggatcgtgtgaagtgggtagcggagcaccacgaccagatcatggcgttcgctgcggacccggtgaacaacgacgagtggaagaccgccgacaagccgctgcaatttctgagctggtgcatggagtacgagcagtggcaagtgttcggggatcgcttcctgagccgcatcgcagtcggcatggacggttcatgcaatgggcttcagaacttctcggcgatgctgcgcgacgcagcaggcggggtggcgacgaacctgatcccggcaccgctgccgaatgacatctaccagatggtcgcagaccgcgtgactgcgatcctgctgggcgaggacgaggatgccgaagggtaccgtacgctgtggctcgaccacggcctcacacgttcgctggtgaagcgcagcgtgatgaccctgccctacggctcccggcagtcttcgtgggcggacttcatcatcgaggactacctgaagtgcggcaagttcccgtcgctcgacaaggccctgtacggccccgcagcgcgcttcctgagcaagcgcatgggtgaggccatcgccgacaccgtggtcgccgcagcgggcgcgatggagtggttgcagcgtggctccgggtcgatcctcaaccaaggctacgaccgcatccggtggatcacgccgtccgggttcccggtggtgcaggtctactgggagtccgaggagcatcgcatcaacaccaagctgtgcggcaacgccaagctgtccctgcgcaagagcacggacgcggtgaagaagtcccggcaccgcaacggcatcgcaccgaacttcgtgcacagcctcgacgccagccacctgacgctggtggtcaacgcggccaaggccgagggcatcgacgccttcgccatgatccacgacgacttcggcacccacgccgccgacagcgcggccctgtaccggatcatccgggaggtgttcgtgtcgatgtacgagcggcacgatgtgctgtcggccttccactcggcctacccgttcctgccggagccgccgccgatgggcgagctggacctgcggcaagtccttgattctccgtacttcttcagctgacggagtttcagtacacctatagcacgaggcaactgaggtccggttggagcggccgcgaaagtaagcggaaccggtgccgggccttttggtacacctatagcacagaggagacaccatggccgaagacaccaaagtgaaagtcctgatgacgctccacccgaaccagctggccgccgtgcggcgactgtccgggctgtcgctgtccgtcaactcgaataccacgcccttggaggcaggtatgcagttggggatggcccgcgtcttgaacatcttgcaggagggtttcaccgttgattcctccgtaccgaacaccaacgacgggtgatagtgagcagatcaaggcggctttaacggccgctttgtatctgtcatctagagaagatagtaaggtagacaacagagaatcttctgtgagctacaactgtgatgatcctgattacacagtggccctgataacacagggtctagtggatgcagtaatcattgatgaagcttacctactatgctttgccattgtcacaccgtggtactccaagaaccgtactacgttcgttgagaacatggtgctgcgaattgggccgggcagttccttcgaccggtacatagccgtgatggaacatctggctgacatcaaccactgcgactcactgagcgcaggcggtgcactagctcggaactcacgagcgctcacacggatgtatgcacgctacggctacctgctggaacggcatgctccccaattcaccaagcgaaggagttaacctatgggtagcatcgttggtggtgggtccgccaagcgggcagcgctgaagcaagctgctgctatcgacaagcagaccaacctccaaactcaatccacgaactaccagattcaggcgatggccgatcagatggcacaggcagctgcacagcaggccgcatctgagtacgccgagaagttgctgagtgccccagtcgataccgtcgatgttcggctgggaacttccgacctcgacttgcagactgccgacctgatcggccgacgcaagaccgcccgctccacctacacccgacccgtgaccacgaccgcagcttcccggctgacgactgtggccgggtcagacctgttgtgaggtgagcatggaccattcgatccaaaccgctcaccgccagttcgaggcttacgacaacaagcggcagggcatcatgtaccgactcgaacgctattcgggctggactgtgccgaagctgttccctcgcaagaaccgcgatcaggataccgagccgctgacccacgggttccagtctctcggcgcgcaggcagtgaaccatctggcgaacaagctgatgatgtcgctgttcgctccgtcccgacccttcttccgattggagctgaagcgcaaggcgaagcaggctgctcaggaacagggcgctgacttgcaggccatgcaggcgatgcttgcgaaggccgagcaggatgccagtctcgaactggacaagcgctcaatccgatcccggctgtacgacctgctgaagatgctgatcgtactaggcaacgccctcatggtgttggagaaggacacgatccgcgtgctcaacatgcggcactacgtggtcaagcgcacccgcaccggcgaggtgtacgaactgatccttcgggagaaggtgcacaagacccagctcgaaccagccgcgctcgctgccattgtcgcgcacccggacttcaagcccgatgacgacggtatggtgtgggagtacaagtgggtcaagctggaccacaagaccggcaagtacaacgaagacgtgtggatttgcaactgcaagctgcccgccaacttctcctcgacctacaccgcagacaagctgccctaccgggcggtgagctgggacttggccgcaggcgatgactacggctccggcttggtcgaagactacgaggccgacttccagtcgctctcgatgctgtccgaggccgcagtgcagggcgcgatcctcgcttccgagttccggtggctggtgaaccccgcaggtcagacctccgtcgaggacttcatggcatcgcccaacggcgcggccattcccggcatgaagggcgacatcgagctgattaacgcaggcgtcgatggtgtgctgcaaaccaaccaagcaatccagtccacctacatcaaccgcatcggcgcaggcttcctgttgcagacggcggtgactcgtcaggcggaacgtgtgaccgcgcaggaaatccgcatggtagccgaagaactggaaggcgggctgggtggtggttactcccgtatcgctgctgacgtgcaggtacccgttgccttttgggtgatgaacctgacgggccgcgacatccgaggcaaggacttggagcctgtcatcatcaccggcttggccgcgctctcccgtacgggtgaccgtgaccggctgttggagttcggcagcaacctcgccaacgtcctcgcactgccgccgcagattctcgaacgactgaagctgtccgcgtggatcgcagacctcgccgccgctggtggcttggacccgaacatctacgtgctgactgaagccgagtacggccagatgatgcagcagcgtgcacagcagcagctcgccatgcagaacgcatcccagcagatcgacaacgccaacaacatggagacacagacacaatgagttccaacgcacctccgggcggtggtcccggcgcaaccgtgatcgcaacctcgcacggcaatcagcccgcaccggcagctccggctcccgcagacgacaagctgctgcccaacggtcagcccgcaccggcacagcccgcagctcctgctgcacctccggctgctgacgcgctgagtctcgaacccgctgctcccgcacagcccgccccggcgagcactgcgccgactgccgtgtcgatcccggactacggcgacaacggcctgaacatcgcggccgaatacttcgtcaacaccgtgggcctcgacatcgacagccgcgaactgaccgaagcagcgaagggcaacttcgccctgctggaagccaagctggaagtcctcggcgacaaggccaagggttccgcaccgatcctcgctctggcgaaggagagcatcgctcgcgtcaccgctgccgcaaccgcagcgcactcggcgaacgttgctgctgtccacgaagccgtgggtggcgcagagaactgggctgcgatccagcagttcgcacgggccaacctgcccgccgaccaactgaagcaggcaagcgaatcgctgtcggctggtggcttcggcgctcaggcgaccgcgcgttacctgatggctctggcacaggccaatcccgcgacgaccgtcaagggcgcaccggctaccaacgccgccgcccccgccgcgtcgatcaacggcgtcgctcctatcacgaaggagcagtaccgcgctgagtaccgcaagctggttgccgagaagggcatccgtggtgcggcccactccgaagaactgcgtgcactcaacgcgcgcgtcatccactaagaccaaggagcaacacaaagcatgagcaccatcttcccgactgtcccggttctgccgaatcaggtcaaccagtccggcaacgagaacgccctgatcctcgaacagttcaccggcgatgtcgagcacacctacgtgtccagctcggtgctggaaaagttcttccctcgcaagcaggtcaagggcaccaacaccctgaccaagaaggccatcggccgtaccaagcttcagaagctgaagcgaggcgatgcgccggacggcaccccggtggacttcagcaaggcgtcggtgaccgtcgataccatgctgctgtcgcgtcacagcatctggcagctggacgaaatcttcaccgacatcgacacccgcaaggaaatcgccatcgagcagggtcaggaaatcgccgagttcgtggacctgaccatcagcatcgccgccgcgaaggccgctgctgccacgcagtcgatcttcacccgcaacggccgcgcgcccgaaggccacttcggtgccacgcaggtcgtgctgtccgccgctggtgacgagaacgatccggccaaggtgtacgccgccatcggcaagctgttctcccgcatggaggaggagaagaaggtcaagccgcagcgtgatggcgtggtcctgatcgtgcgcccggcgatcttctacctgttgcagcaggccgagcagatcagcaacggcgagtacctgacctcggacggcaacaagctgaccggcatcccgaccttccacggctggggcgtcccggtgctgtcgagcgagaacctgccgaacaccgtgatcgagggccacctgctgtcgaacgacgacaacgacgacttctacgacggcgacttcagcaccctgatcgccgtggccgtgtcgccgaaggccctgctgatcgccgaagcgctgccgttgcagtcctcggtgtggtggagcgatgcctcgaagtgctacttcgtggactcgtggatgtccttcgccgttggtctggatcgcgtcgagaacgcgggccgcatcgacaaggttgcctaatccgctgggcgcggtccctgaatccttcgggtaactcaaaccgcgcccgccttccaccaacacaggagcaacatcatggtctttgaccgaccgttcgagatttccaaccgcgtcgtcgccgcaactggcgtggccggtctgcccgccaactccgttggcaccgtcgtcggcgtccactacgacgccatcggctcgggctgggtcgtgcgcgtccgcttcgtcgatgacgaaatcggctcgcaggacatcgagtacgcaccggcctcgctggctctggctgcggactaagcaacatcccggcagggacgctccggcgtctctgccttgttcctctcaggagacaccatggcattcatcaccaagctcgacatcgtgaacgcctgcttgaagacgatgggcgaaacgaagctcaacacgctggaagatgaccacgtatacaaggacgacgccgttgacttgatcgaccgcgtgcaccgtgacgtgtcctcactctcgctgtggttcaacaccgaatgggtggagctgaagccgcaggcaacgagcaagtacatcatggtccccacggacgtgctgaagctggactgcaacccgagccggttcggccacgtggtgcagcgcggacggcgcctgtacgaccgcaagcgcaacacctacgagttcgaccacaacgtgcatgccaagctggtccggctgctggacttcgatgacctcccctacgaggtgcagatgttcgtgcgcgacgacgcggtgctgcggttccagtccgacttcgatggcgacaacaccaagtacgccaagatcaagcagcagcgcgatgacagctacatcaacttgaaggccgagcacatccgccagatcaaggcgaacccgctgttcgctcgcgcatccgttgacgtgctgcgttcccgttactggaactacagcggtcacccgtggcacagccacgtcacattccccggctaaggagacaacatggcaaaggcaggcggaacctatcccgacatccttcagggtgtcagtcagaaaccggcgcatcgtcgtcggccgggccagacgcacgagcagatcaacgtgctgtccgatccggtgaatggcctcgtgcgccgtcgtggtacgcggttcgctgcttcccaagccgttgtcacctcggccgagctgcgcaacatggacgtgttcgacttcatgcaggaaggcaaggagtacgcgctgctgtaccggcgcgatgcctcgaccttgggcagcgagtccttcgcgttcctctacaacaagacggacgagacgttcatcccgctggtgtacgagaacagcacgtgggtcaacacgctggtcagcggcggcgcatcgtcgctcgcggccatcggaagctacgtctacatcgcaggcaacaccacgatcccctcggccactagcacgaacgtgtggcaggagcagacgaacatccagcgcctcgcagcgtgggtgcgtagcggcaagtacaacaccacgtacacggtgaacctgacgcggacggacaacacggtgctgacggtgacgttcaagacggtgaccgcatcgtatcccggcacgctcgacaccagcgacatcccgttctacctacccggtggcacggagccggacccggcgtaccagaagtatgtcaacgaccgagtgaacgagtacaactccgcagtcaacgagtggatcgtgacgagcgccgagcagacgcgcccggagtacatcaccgagcagctgtcggatttgctggttgatgcaggcgtatctgcgacgtacatcaagggcggcatcgtgattgacgacgaccagttcaaggacatcacggttgacgacgagggcgacggcacgaccttctatgccgcagggcaggagattaccgacgcgacctatgccgtcaagttccattggcacggcaagatcatccgcgtgcgcccgagcggtgcaggcgctgacgagtcgtactacctgcgtgcggagttggagaacggggagacttcgggctacggctcggtggactggtatgaagcgcccggcgtggagtgcaccatcgacaacctcgtgtcccagctctacatccacaacggtgtgggctacatcgcacgcaacggtgcgggcctcacgtctctggctccggccagcggcgagcatccagcctacggtgcgcgcgtggcaggcgacgggctgacctcgcctatcccgtggttcatcgacaagccgatcaccatgctgtccgtattccaagaccggctggtcatcggcgcgcagaactacgtcaacgcctcccgctcggcggactacctgaacttctggcgcggctcggccgtcaccatcgaagacagcgaccccatcgaaatcttcgcgcacggcagcgagggcgatgtgctccggcacgcgacgctctacaacggcaacctcgtgatcttcggtgaccgtcagcagtacggcatcagcggcgactcggtgttcagtccgaagaacccgctgattaaggcgttcagtgccaacaaggattcggtggacgcgaaggcgcagacctcgggcaactacatcttctatgcgcagtacggcagcgagggcacgagcctgcaccagatgcgggtgggcgctctcaacgggcagcagacggtgacggacgaaatgtccaacgagctggactcgtggctgtcgggcaccccgttgcagatcaccccgctcactgcgccgaacctcgtcatgttccgcacgcgcgagcacccgcaggacttctacctgtaccggtacgaggacaacaagaacaacgggcagcgcatcgtggatgcgtggtcgaagttccggtaccacccggcgctgggcgaaatcatcggcgtgagcagctacaagaagaatggcctcgtgttcactgcacgcggatcgctggtggcgtgcgacgtgttcgacccgaagggcgagccggactcgcatgcgtgcctcgacagctgggcgagttttggtacacctacgggcgtacagaccgcgagcgcaagcatcgccgtcaatagcactagcccgtacttcctgctgggttgtccctacgcgcaggcgtctgacttccttagccagttcgatgacctcgatgctggtgcgctggaatacggcgtggtgtccgaagctctggtgatcccgaccaatccgttccctcgggaccagaacggtcaggccgtactcgatggccgcatgtcactcaacaaggtgacggtggacgtggagaacacggcaggcatgatcgccacggtggcaacccgcaacaacgcggtgaccaccacggacttcgagggccgcatcctcggcgactccgacaacctgatcgcgcggcaaccggtgtaccgggggcagctcaacatcagcgtcgggcgcgaagtgcgcgagtgcacctacgagattcgcagcaaggattggctcccgctccgggtgaccggcctgagctggacgggtcagactttcaacaatgtacggagggttagctaatgggttcggttaatacgatcctgcaagcgaacaacaccacccgcgttgcccgtgcgaactaccgtgcagccgttgcgcagaccgacaaccagaaccgcagcgaggtcgccaagaccggcttcgctgatttcatgcggtccctgaagaacaacgcccagctggacgccgccgcgaaggagtacaactccaacatggaagcgctgtccgaggagctgcgtgcacgccaaggggctgggcttaactcccagctccaactggcgaacgcgcgaggcgcacttcaggcgcaggcaggtgctgtcggtgtcggcggatcgtccgcagacctgatggattcgatggtgcggttgcaggcggaaatggatcaggagacgcaggccaacgctgttgcgctgcttgcctcgcgcggtgcctcgcagactgcgcaggtcatgtcgcgtgcgtggaacgggatggacatgagccgttcgttcggccagttcgactactcgcagcacatcgagccgcaggcaatgaagcgtcgcttgggcaagctgatcggcgtggccgtggctacctacttcggtgggccgatggcgggcgaggctgtggcggacttcgcagtcggtacgtggcaggcggacaacggcaacttcactggtgcctcgcagtccttcagcaacgcagcgcagaatggcatgcaggcgtggcagcagtccaatgatcgcggcggcaagtcgtgggcgtctactaccttcgggtacaacgacggcaccggcaagcagtccgtgaccggggcgaaggtcaccggcaacttcggcaacaactacgacaacttctccaccactacgtctggcctcggctggttcgatagcggaagcgggggcaactcaggaggtgcatggtaatggctgacatcggcacggttaccttcaacacgcagtccgcattgcagggtggcatcaacgccacccccgcactgtcgggcaacaccagcattcaaggcgctggtgtgaatccggtcggcccggttcaatccggcaacgactggttcgcaagcactggtggtatgacgatgccggacagcaacctgccagagttcttgcaggagctggcagcgccgaacaccgccaagctgaagcagcagcagatgtgggatggcttcgtagccgcccgcgctggtaagaccatggacgagattgctgcgaccgaaccgtggtacaagaaaatcttcggcgacaccaactacgagattggcgcgagcatgtataacacgctctcgcaggtcaacgaaatggagagcgacttgctgcgccgcatgccggagttgcggcagcttcctcccgaggcgatggcgaaggagttcaacgacctcgccactgcccggatgaccggcaacggtttcgcggacacggtgttgcagaagaccttcatggatcgcgcaggttccctcatggacctgcacaccaaggagcgtacagcgtggcagcagcaggagctggtgaaggcacagtacgctgcgaactcgtcggcgtccaccggcttcaacgaactggcgaagcgcacggcgatgctcggcaccaaccggccaatggacgagaaggctaccgaggcgctgacgcaggcgcagctgtccttgctggatgggctgtcgccttcgcgctaccagacggacgagtcctacaagtccgcgatcacggcgttctaccgtggcgctgcggatcgtggcgagttccacacgctgaagttcctcaacagcaagggcgtgctaagcgccattgaccctgatgggcagcttggaatccagcagtacgtgaagcaagcgcaggaccggtaccgttccgactggctcgatgccaacccggagcaggccgagaagatggcgctcgtctccatgtacgcatcggagggcattggtgccaagccgtctcaggcgatgatcgaggaaatgaactcgacctacgccgccgagacgggaagcgacacaccgctgtactccggcacacagctggcttcgatcatggcgcagtccgcaggcgcacacatccgcgcacaggaagccgtcatcaaccagcgcaacgctgcggccaaggccgcgctgaccgaccagcagaagctggccgcgcaggaggaggacatccgtggtggcatcgaagcgttcaagcgcggcacgtacgcgcagacgatcaacatccccggagtggacaaggagctgatcgaagcaaacacggtgcaggcatggaatgccacgatggcatcgaaccccaaggtcgctatgtcgcagctggtgtggaacgccaacaccggtcgaggcgctgtgctgaagggtgtggccgaccagttccagaccacggcgcgcgctgtgctccgcgatcagccgaatacggcagcggccgcactgtaccagcagtggaaggagctgaagcagaccaccgccgcacgcatcgacacgaacggtcagcccgtacagggccgactgactggcgcgactactgctgcgctgtacttcggggatagcgtcaacacgttcttcaacaagctgcaagcgttggagaatggtggcgtgaacttcgagcttgcttacgaggtggcacgtggagaaatcaccaccgacgacccgacgcagtttgacgcgaacagccgtaaagaatccgaggctactcaggctcgtgttacggaagctatcgccaagctcaaccccaagtacctcggcatgttcggcaacaagctgggcgactctggccgcgctgcgtatgctcgcgccatcgtacgctcggtcaccgacagcggtggtctgctggacacttctgcggaaggcttgcaggctgcggctactcacgccaagctggcctacggtctggaagacgcaggcaagtatgcgtgggagaacgggcgcgatgacgaaggtcgagtgatcggcggcgtcggtgcatggctgggcttcatggacacgaaggaaaccggacccgctatcgagaaggccatcgacgcagcgctgcgccgggtcaacatcgagccgagcactggcctgaaggctgacgtgttccgcatgaaggatagcgagaacggtgagccggtgctgtacgtcaacgctgttggcgagaagggctggaaggttgtgccggtgtacgggcgcgacatcaaggccgagtacgagaagcacaccaagcagcagcgccagttgcaggccccggtaccgcagggctacgttcgtatgaacgacggtacgattcagcagagcatttccatccaacccaaactgtaaggagatagacaatggcactcgatctttcggggctgacccaagaccagcagattgccaaggctgccgcttacgcgggagtgccggagtccatcgtgcgcggtcagtggcgagtagagtccggcaacgggcgcgccgccaaggacgctgacggtgtgatccgcagcaaggcaggagcacagggcgacttccaagtcatgcccaccacgcaggcaacgtgggaagcgcgcaacggtcgcaagtacgacatgcgcaacttccaagacagcatcgagctgtacgccgacatcatgcgcgagaacatgcagcttgccaagggtgacgtgacgaaggcgctgcgcatctaccaaggcggtaccaaccagaagaactgggggcaggagaacgccgcttacgcaccgagtgtgctgggcggcgcatccgctcccgcagtgtcatcgcagccgcgcagcctgactaccacacaggcagacctcaacgccgcatggcagggaaacccgaacatgcgcgaccgcacgtggtccggtgcatccatcccggatgcgtggactggtgcgcccatcgaaggccgcaacgctctggcgtcggcagcgaaggaacacatcggcaagattcgcgcgggcatcgccgagctgtcgatgggtcaggtggctcaggaaggtggcaccgcagcggaggctgtgggtaaggcgcaggctgtccgcgcatcggatcaggttgtgccgtggtgggttcgtcaggaagtggacgttctgaacaccggcgcacgcaaggcgctgctggatcagaccgagcaggccctcgcacaggaccgtgcagacgaggaactgcgcaactcgcttaccttcctcgacaagtggggcgctgctttcgatagcggcatcggtgctgcgatcagcaaccagctcgcgcgtgaggacgagaacgtgccggaaggttggaagtacgacccgaaggagtgggagaagtcgtggatgactgccgacgaactggaagacatccgcgatgctgcgtactcgccgaacgaactgaagtacgtgagcgaccgacagtacatgcgtcgcagctcaatgcgcatcaaggatcagcagaccggctggtcgagcttcggctacgacctagtggcaggcttcaccgatccgggcaactgggccatcggcggcgtgactgctgcgggtgccaaggtgctgggcgtaggctcggcggctctggttgccgaaggccgcgtcggtgcgtccctcgcgtccgcagcagcggagaacgcggtcggttccgtaatcacggacgccgcgctggttggtatgggtgagcgtcgcaacttcgcggactttatgaccgacgcggcgttcgccaccaccatcggcaccgcgatgcacattccgggcgtgcgctcggctgcacagattcgtgacaaggctaccatcgacctgtccgcaggcaacgctgccgcttacggcgaagcgtggtcggctgacctgaaggcccgcgccgttgccgagctgggcgagaacgctaacccggtgctggtgaacaaccgcatccaccagcttgcaaagcaggaagctgtggactggttgcgtgtaggcatggcagatgtgccggacgacttccgtatcttcgcccgccccgacgtgcaggaaacgaccactaccgcaggcaccaccggtgcactggcgagggacgtggacaacgtggacgcaaccacgggtcagtacaacgacagtgtgggtggccgcgtcgatcagcatgacccgctgctggaacgtgcatggaagacggcgggcatccgtggcggcaacgtcgagggtgtgctgaagtatctggaatccaatgcctctatcccagaggacgtgcgtgctatcgccaatgcgctgaagcgtggcggacgcctgagcacggtgaagatcgtgccggaatcggaactcgacaagtggttctccggtgccaacatgggtccgggtatgcgcgtggccggtggctacaacgccggattggatgcgatggcgatgcggaactatacaccggaagtggtggtgcacgaaatgctgcacgctgctaccttgcgtgagctgcgcagcaactcggtgttcggtcaggaaatggaagaactgctgacgcatatcaacaacagcatcggcagtgtggactccacgctgaccaccgctgcgatggagacgcgcatcaaccagccgcaggcaggcttcctcgccaacaccgacgagctgatttcctacggcctgacgaaccgtgctgtgcaggcggtgctgcgtcagatgcccgctccgggcaacacccgccccaatgcgtgggagtggttgaaggataagattgcgcgggtgatgggcctgaagaatcaggagtccgctctcgaacggctgatgtccgtggtcggtgacaacctcggagcggaagtgcgagacacgcaggccggtacccggcagactcgtggcatgctcgccaactccatcttcaagtcgaaccgcgagcgcaaggctttctaccagcgcaccgggttggacaagtccgtcagcgatgacgcgatgcgtgtgcaggtcgccgaagtgatggcccgctccgaacgcttcagtgcgcagtacggcatcgacgcggcgaagctgtccaccatcatgcagcgcttcgggctggaagctacgagcacgaccctcatgtcgtccaagtcgccggttgcccgcatgcttgcgatcaccctgttggagaatcccgagggtgcagcaggccgacacagtacggcggcgatggatcggcacggccggttcgagtcgttcatgggtacgcgcccgcgtcagtgggaagcggcctaccgcctatggcgtgcggacgtgcgtggcatcggtgcgatcaaggacttcgccacgggctggaaggcacgtgcggacttcgagtatgcagtgaagctgtaccgcgagactcgcttcaacggtggcgacatcccggatgcacacgaggcagtgaaggcaatggcccgtgagctggaccgtgggtacaaccgcatggccgcagagcagcgcgcggctggtacggtgggcgcacagcgtctgcccgaggaagacgtggagggctacgagtcccgcacgtggctgggcggcagcatcgcagctgctggtccggttcgccgtgagggaatccgtcaggccatgcgcgatcagttcgaggtgatgggtgaactctacggggatgacttcctcgacaagttcgccaccaagtatctggaacgcatcgagcgcaaggctgcgggcatcatcgaagcgccgggtcaggtcttctcggagtcgcaggcggatacgctgcgcgacactctgcgggcgatgtcgctcaacgaggaggagattcagaaggtgatgggcaagtacagccgtggaggtgcgaagcacaccaaggcgcgtatcgacctcgacgtgaccaagcagtacgaagatgctgatggcaagttccgactgatggactacctcgacaaccgtgtgatggacaactaccgcaagtacgcgggccgtgttgctggtgacatcgctctggcgaagcacggcatcctcggcgacgcgggcatcaacatcgcgcgcgaggcaatgcgcctgaccggtgccaacgatgtggagctgaaggcgttcgagcaggtgatgtccgagttccttgggcgtcctgtcggcaccggcgatccgactgttctggcgaatgcgcgactgctgacctcggctatccagctgggcggcgcgggcatcaatcaggcagcggagtacagcaacggcctcgccgctgttggtgctgccggtgtggccgacgcaatccgtatcgctccccgcatgcgcagcgaaatcatgcgcatcctgaagggagaggacagcggcaaccaaatcctcgacggcttcgagttcatcagcgggcgcggcttcggcctcgcgggctacgacctgcacatgttcaactcgctggacacgcaggcttcgatgtacggcagcgagcgtgcaggcttcctgacctcgctggtgcagaaggccgcgcatgcgaaccgcatcctctcggggcagcgggccgtgctcgccgtgcagcagcgtgggttcgcggaggtgctgatcgccaagggcgtgaagttcctgcgtgacggcgcggaggctgacaccgccctgaaggacatgggcattgacgacaccctgctgaatcgcctccgcgctacgcaggatcaggtcgttcgctggggcgctgacggtaagctggaagcagtggacccgcgcaacgtcgagggactggcggatcggcaggcatggttggcgttctacaacgcgatcaaccgtggcacctcgcagattcttcaggacaccttcatcggcgagactggcaagtgggcgcacaacggttggctgaagctgctgttccagcaccgcaccttctcgctggtcgcacagcagaagcagctgggccgctacgtgggcaactacggtgcgtggcagacggcgggcctgatcgctgcggcgatggccgtggcggctccgctgcaagccctacgcgtgctgtcccgcgtggctctgatgaacgatcaggagcgcgacgaggccatcgaccagaacatcctgtcgcctctggcgctgggcaaggccacgctgaactacgtgtcggcgaccggcatgctcaacgatgtgctggacgtgggcacgggcgtggcgggtggctggtacgagtacgccaccgatacgcagggtccgacgtggctgaagcagctggccggtgggcagttcggcaaccgcaaggaagtggtcggcgggcagttcgcgccgtcgctgggagtcatcaacgacttcgctcagggcgttgctggcaagccggagaatctggccgacgtgattccgggcgggcgactgccgatggtgatcccgctgctgaagggcgcagccagccagtggaaggaggagtaagatcagggccaaggacggcccacccttttggtacacctatagcaaacaggaggcagcatggcagttccagacccgcagctgcgctacgcgacagacgtgttcgacgccgatggcgtgaccactgactggcagatcagctttaccggtggctacatcaacccgtcccacgtgtacgccatgagcggactgctggacgaggagactcagctgctgaccgaccggactccgcataccgtggaagtcctaagcgaagacgatgacgctagtaccgtccgagtctcgcctgccgtcgccgctgggcgcaagctctacatctaccgcagcactccggtgcagcagatgctcgttgactacgttaacggtagcatcatcagcaagaccaaccttaacctcagcaacgaccagctcctgaagatcattcaggaaatgttcgactcgctcaacatcgccacccttagcatcgaccagcaggtcggcgtgatcgtggacctgaacgagattatccagaacatctacaagcaggtcaccgagttgttggccgctggtggtatcgtgtccgtcgccccgcgcgtctggtccggtgcttggactggcgatcaggtggacgacaccgacttcgatatggtgggcgcggacgtgtccggcgcaggcttctacgacgtgtacgtcaacggtatcggcatgcagccggacgtggactatcaggtcacgcttgccgacgacaccgacccgagcttcatccggttcgccacggttcctgccgaaggtagcatctggttcgccgtgctgcgtggttacgccaagccctacaccgggcctgcgccgatcaccgctgctagcttgcgcgtgccgatcatcccggcagaaggtccgacctactacgccgccaaggctaccgagtacggcctcgtgcgttgcacgtacgccgggggctgcgccgtcaacatcaacctgatccccgaagtgggcgacggtgagacgaagctcgcctcgggaagctacttcagcgtgcagcagaaggcaggccctgtggtcatcaccggcgacgtgggcgtaacgctcgaagtcccggtcggctgcaccgccgccactcgcggcaccaactccgtcgtcactgcaacgtgcatcgacggcgacaccaacacgtggttgctctcgggcgacttggctaaggagtaagcatggctaatcacttcaggctgtacggccgaccgctgatggcggacgaggttgcagatggcctgtcggtgacgggcgtgctggaagggtacacggcgggcgaggcttacgagtctcgcctgtccatcaacaacccagtcggccgctgcaccgtggaggtcatcgaatcgacgctcccttcgggcgctgcggtacgggtggacaacatcaccaaggaagtcgtcgtcaagtgggcggctttcactgaagtcgtggacgaggaaactctcgtaccaaacggagacttcgaggcaggcgacgacggtacgtgggtaccgggcggtgggtcgaacggcgaaggctggtcgattggcactggctcggactacgacacggacagcggcgtgtacagcgcacgcttcgccaacatcaagacaggcggcagcgacctactcaacccgctgatcccggccgaggtcaacgactacatccgatgcaccgccgaagtccagcagggcgcaagctcgaagggcaaggctggtgcgcgcgtgtcgatcatctaccgcagggaagacgggaccgagctgcaacgcaactggggcaacatggtttcctccggcagcaatggtaactggcaccagtcggttgccgagggcgctgcacccaaggacacgaagtacgtgcaggttgtactgtcggcgttccgcagcaagcagaacaagccgctgtgggtagacaccgttaagtggaaccacaagtacgtactcggacagaacgatgacagctcctacttcctgagcatcaaggtcacggatgggttgaaccgtgtggcctactggtccgggcgtatcgaggaacagggaatctacgttacgtcaaagctgtatccgttctaccaattcgatgcggccatgctgaccagcagctttgctggatactctaacatcgacatgcttcctcctgtggatagcacgctggtcggttcttccttcgtgagttgggaggtccgcagcagccgtcaagattacgtagcctcacccgagtacgccgagctaggctcctcgtttgtaggctgggaaatcaagtcgatccgcaaggaatacgacgcaggttccgagagcgccaaggttacctcgggattcatttctttcaccctgaagcagcaccctattgtcaatcagccgctagacgcgagcgcgatggcaaagagcgccttcgtatcatggagctttgcatgatccacaataagatgggagtcgctggtgtgttcaccatcagcaagggcaagtcgttggacgcccttgaagtagtggcagactggcaaaacaacctcattaccgacggcggtatggatttcatcggaggccacgagtatccgcagtccctctacacggtaatcgggtacctcggtgttggcagcggtagcgccgaacctgcgtttaccgacactgcgctcggcgcgcaggttgctcgtgtttcctacacgtcaagcgacaatggcggaaccacaacgtcaccctactacgcttacgggcgcatgcagttccagttcccagcgggtacggcaacgggtgtgctgtcagagctgggtggtttcggttacaacggcgacaccggtgcttacgttctgactacccgcgcgctcatcaaggactcctcgggcaatcccaccaccatcacggtactggccgatgaaatcctcgtggtgacctacgagattcggctgtatcctgacctgactcctgtggtcaccacggagacgatcaagggcgtgagcaccactgtgacgtgcaagccgattgccttgggtcgcagcggtggcctcagcggcgcgtcttctgtggtttggagcgattacgtttggggctgctactacttcaccggcggcactggtgatggtacgggggcggtcaccgatcagtaccctcccggcagcaacgtcagcttctccgagctgcaacttcagcgagttccatacgtgccgggtacccactaccgggattgcatctgccgtatgtcgatcaacaacaaccccggagcgcctatcactgccgccgctggaatcggcgctgctatcagctggcaggtgggattcaatccgggagttaccaagacgacctcggagaccgccaacctgcgcatgcgggtttcttggagtcgctacacgccatgatccccactgtctcccaaagcatccaacgcggtgactgggtggagcagcagaaccggcgcacccgcccgctcattgacttcgagcagggcgggctgactctcaacgcggcagtggacaacctccaagccgcgctgtggactgccgagagtgacggcagcagcgtcgtcgtttaccgcgacggcgttgccccggtcaccgtgctgaccgactccgggatcacgcagatcgcactggccttcgaccagaccatgcgtccgcacgtgacgtacatggcaggcggtgtgtgcaagttctactggtacgacacggtggctgcttcgatgcagaccatggtgatccccggtgctactacaccgcgcctgtgcatggacgagaagcgggctgtctttgccacgcagagcgacgtgcttctgtcgtacaagaacgggagcaacctgtgcgtacgcgcgcagcgcgagcgcttcgcaaccgaacacgtgatcgccaccggaatccccggtgacctgatcgcggttggcatgaacaacgtcaaccgcctgcaatggaagctcgtcggcaatcccgacgactggccctaacctacaggagaacagcatgaccccgccgagtgtggtcaatgaggtcgtccgaacctcgccgcttacgctcggcgcggtctacctcaacttcatcagcacgtatggtgctgccatcgtaactacgctcgccattctgtacgccgtcgcccagttctactggcgcgcgcgcgagcaccgcaagatcatgggagggaaggatgtcgaaccccgcaagtgaaggcgcgcttggtgcgctacacgaactcgtcgccacggtactgaaggaacgcctcgccaatggcgagctgtgcaccgctgccgacatcaatgccgcgatcaagttcctgaaggacaacaacatcacggcgacgcgtgaggccaacaaggcgctcggcgaactggaagacgaactcggcaagcactcgctgccgcaggccgacgacaccgagctgcaagcagcgctcgacaacatcgtgaactttccggggagcgtagccaaccatgcgtgagtcagccgaagcggcagacatccgtcgccgcaagttggagctgttgcagaaccactaccggcacttcgccaccttcatgcgcgacatcatgaaggtgctggggttcgagccgacgtggatgcagtacgacatcgccaactacatgcagtacggcccgcaccttgcaatggtgcaggcgcagcgaggcgaggcgaagtccaccatcgccgcgatctacgccgtcttctgcttgatccacgatcccacccaccgtgtgctgatcgtatcggcaggcggcacgcaggcatccgagattgctacgctgattcagcgcatcatcctcacggtgccgacgttggagtgcatccgcccggacaagaacgcgggcgaccgcacctccgtggatgcgttcgacgtgcaccattcgttgaagggcatcgacaagtccccgagcgtggcgtgtatcggcgtaaccggcaacctgccgggtaagcgagcggacctgctgatcgccgacgacgtggagtccaacaagaacagccgcactgccgcgaaccgcgagctgctgctgaccatcacgttggagttctcggccatctgcaccggcaagcccggtactcccggtcgcatcctgtacctcggcacgccgcagaccggcgattccatctacaacaccctgcccggacgcggctacgacgttcgcatctggcccggtcgctacccgaccccggcacagcgcgagcactacggcccgcatctggcaccgtctatcgtgcagcgcctcgaagccgacccgatgttggcgttcggtggtggtccgatgggcgacgaaggccagtgcaccgacgagctgttggccggtgagcagaagcaccagtccgaactgcgtcagcgtggaccgtccagctaccagctgaactatatgctcaacacgcggctgatggatgcgctccgcttccctctgaagaccgagaacctgatcgtgatccccggtggtggcgaccgcttcccgctgacgatcacccgtggcctgagcaacgcgcaccagcgcagcttccagtccagcgggtacggcttcgtgatgatgatgccgcacgacatgagcaccgagactgcccccgtgcagggcgtgcacatgcagatcgacccggcgggtggtggtgccaacggagacgagacggccttcgccgtgaccgccttcctcaactccaccgtgtacgtgttggccattggcgctgtgcccggtggctacgacggtgatggcctgctcgaactccgccgcatcgcggtgaagtacaagccgaacgtcatcagcatcgaaaagaacatgggctatggcgcgttcgccaaggtgttcctgcccgtcctgcgagaagatcgcggcacggagaagggatacaagggcgacatccgcgaggagttcgtgaccggcaacaaggaagcccgcatcatcggcacgctcgaacctgtcatggctcgcggctcgctggtcatgctggaatccgtggttgaaatggatcacgagtacacccagcgctacgcatccagcggcaagcgtcaggtctacagcctgttccaccagatggcgaagatcacgcagcagaagggcagcatcgcacacgatgaccggctcgatgcattggaaggtagcgtgcgtcactgggttgcgcagcttgcactggaccagaacaaggccatcgccaagcagcagcagcgagagttccaagactggatcaacgatcctaccggcatgaaggcagcgacccgcaagagtccgctgcaacgtggccgtccatccctactcgaccgttaccggaggtaacccaatgcagaagtccgacttcaccagcaactacaccggcctgttcggccgtggcaactacctgcaccgcgaactgctggccctcgtggagcatgcggagcagcaccccgcaaccgcagcgcagcttctcgcccagttccagaaggacgccaccctcgtgctgggcgccctgatcgctgccggtgagcgcaccgcttcctcgggtccgaactccggcccgcacactccggccgatctggacccggatgacgacccgctgaccccgtaaggagcaaccatgaatcagcagcagaaccaagataccagcaacaaggggctgttcggcctgatcggcggcatcttcatcggcatttcggcaacgctgctgtcattcacccaaggccacgaaggggtacgctacgctgcgtacctcgacaccggccgggtgccgactatctgctacggccacaccaagggagtagcgatgggcatgacggcaacgaaggcacagtgcgacaagtggctgatcgaagacctacagatcgcccagcagggcgtgcgcaagcatctgaaggcccccgttaaccgcaaccagatcgacgcctacacggacttcgtgttcaacgtgggcgagaaggcgttcgccgacagcaccatgctgcgcaaggcgaatgcaggggatcgtgaaggtagctgcaaggagttcctgcgctgggtctacgtcggtaagctcgactgccgactgtccagcagccgatgctccggcatccccaagcgccgcgacgcagagttcgctctgtgcttgcgccccaacaacgaggtgatccaaccgtggaaaccccaagtgaagtgatcgcgcgactcggcggcaaggccctcggcctgctgctggtcgtgaccatgttcgtgtgcttcggactgtacgtctacggcttgcagcggaaggtggagaagctggagactgcccaagttggcacgaccgctaccgccactgcggctaagacgcaggctaccgggtacgcgacctacatcaaagagaaggaggacgtgcgtgttcgcactgaagaagttcttgacgctgccccggagtaccgggatggcactgttcctgctgatgtcgctgacctcctgcgcgaacctgccggttccaagtgacgacctgctgaaggactgctctattacctacctcggtggggagaagggcaccgcttcctcgcaggacaaggtggtcaagctcgcgcaagaccgccgactggacaccgttctgtgcaacaaggacaaggcagcgctgcgtgcgtggaaggccgaggtgtgcggtaccggtaagcgccggtgtacgggtgacaaatgaccaccatcgcatgggacggcaagcacctgtgggccgatagtcaggccacgcagggcgaccacaagcacaccgtgcgcaagatcatgcccgtatcgacacccaccggccctgtgctgctgggtgtcaccggggatttcacagtgcttcgcccggttctcgctgcgcttaaagcgggcgaaggctacgaggagcacgttggcaagtccgcggcggtgcttgtggttaaggacggcgtactcacggtcactactggcaagacgcagtgggtcgaggaggctccgtacttcgatggcagcggcaaggcgctagctctaggggcgtatcatgcgagcaagtctgtggctaaggccatggctgctgcgatagctcacgatgtctacagctccgggcctatcatcaagctaaaggcaccagttcgcaaggcttagtcataaggctacgtgggtagccgggccaaaatttgcttcacaattgcgcgggggtcactccaatagaagctcccgcgcgtgcccccgtacgccctcgcgttacgcgcctgcgggtgtgcatgggtgcgtgctcgcgtgtgcgcctgtgtgcgcctcacctgcgggcgcgagtcaatgcacgtgggtgtgtgcctgtgcctgcctgcgcgtggcgtgtgggcgcgcgtgggcgtgcctgcgtgggcatgcgggtgcgcctgcggttcctctcctgccgtggtgcgtggtgggctggctgaatggttaataaatctcccgccgaaaggtgttgacgtggtgccgtgggtgtgatccaatggcgtcactggggcagcgacagggcttcaggagggccgcaaggggcttgacaggtgcatacctacctgctaccatgcgaaccgcagctgtaggcgtgtgagggccatctgtatcgtttcggccttttggtacacctatagcacacagtcggctcaacctgaatcaccgtctatcggtactctgtcgagctgattagttagctacccgctaggccaacggttgacacacggccgcaatggtagtaagctgcaacgcaagtcgagtgacgtgatccgtagtggcgccgccaacaagtgggctaagggtacatgggagtcactggtaagggatgcgaggagctaccgaaccacgcttgacactaagctagcagtgagctatgataggcggcaagtggtagccaccggaacagcggaacagctagcaccttgcggactaccggcatacatggtaggatggtggcgacaggacgcccaacgggttagagacccgaatcgagccaagggcttgacaggatgcaaacagggtgctagtatggcaccacgctctgaggagcaccggcactggaccgggtaggactaccgctaacgggtagggtgtaacgtgaagcccacgggtggaatgccaagctgcaacgtagcactagcggataaccggatgaactgggatgtcaaaggcccatagaatccaccagactagcaacactggtgccgctttacctaagcctaacgcttagggcctgcatttgccgtgagagtcggccacgcagcgtaacccactgccaaggtgggaagccggtcataaggaggtggtgagcctcctatcgcatggaatactatgcgtttcgtgaaaagtctctatgggacacacggtgacaatggcactgctagccggagtagggttgacagcccgaagggctagcagattgatgcgccctccctttgcgatgaccacgcaggcaaatccggtggttcagtgtgcgcc

SEQ ID NO: 8 - DNA, 42944 bp, unidentified
  source 1..42944: mol_type = genomic DNA
ttgtttcgccacgtaaagaaggtcgccgattacgaaggcttccacggccacgaatacccgtatatcggatggaacgaattaacgaagcatcctagcggcgacctgtacgacaagtttatgtcggtcaaccgcgttacgttcgatccgatcaaagacacgccgaaagacccgaagaccgggcgttatttgacgcctaacggtctgccgttgcccgaaattaagtgcgaagtattcagcacgacgaacccaagcggccccggccataattgggtgaagaagcggtttattacgattgcgccgcgcggcactgtcgttcgtcgtagtatccagatttataacccgaagaccgaacaagaagaaacgcacgtaattacgcaaattgcgatcttcggttcatacaaggaaaacccgtatcttccggcgtcgtatatcgccgaattggaaagcattaaagaaccgaaccttcgcaaagcttggttgtatggcgattgggacgttaccgcaggcggcgcaatcgacgacctttggcaatcgcatatacacgtcgtaccgcgctttgtcgtgccgccaagctggcgcatcgaccgcacatacgacgacggcagttcgcacccgtttagtgtgggctggtgggcggaagcggacggcaccgaagcgactatcgttctttccgatggaaccgaattcgtgttctgtccgcaaccgggttcgctgattcagatattcgaatggtacggatgcaagaaggacgaaaaaggcgaattcttgccgaacgtcggtcttaaaatatcggcgtcggacgtagcgcaaggcattatcgaccgcgaagtttcgatgatggcgaacggctggatttcgtcgcagccgtggcccggccctgcggataatcgcattcgacaagttatcgacgttgaactagacacgaccgaaaagcttatgtcgaagaagggcgttcgctggatggaatcggacaagtcgtcgggttcgcgtgttatcggcctacagcttttccgcgaccggctagaagcgtctgttaaacgcgaagggccgggggtatacttcatgtcgaattgcgttgcaagcattgatattttgcccacattgccccgcgacgaaaagaaaatcgacgacgtagacacaagcgccgaagatcacgtttacgacatgacacgttatcgcatgttgaaaggcgcgaacaaagcggctacgaaagtcaaagtatcaatgccaacttaaaggaatcgaaatcatgccgaacgtatcttttgtgcgtcctgaactgtcgaagttgcttcccatgtactaccttattcgggacgcaatcgcaggcgaaccaacggttaaagaagcgcggacgaagtatcttccgatgccgaacgcttccgaccaatcgaaggaaaacaaggcgcgttatgatgcgtatatcgcgcgggccgtgttttacaacgtagcccgtcgaaccctgttcggtcttatcggacaggtgtttatgcgcgatccggtcgtaaaggttccggccctgctgaacccgcttgtcgcaaatgcgaccggatcgggcattaaccttacgcagctttcgaagaaggccgtatcgttgaacttggcgtattcgcgcgccggaatcttggtcgattatccgacgaccgaagggcagggcggcgcgtcggttgccgaactggaagcgggcaagattcgcccgacgctgtacgtctacgcgccgaccgaaattatcaattggcggactattgatcgcggcgcggaagaagttttgtcgttggtcgttatcttcgaaacgtggtgcgttcaagatgacggcttcgaaatgaagaacagcggtcaattccgcgttttgcgtctggacgaagaaggctattacgtccatgaaatttggcgcgaaccgaacccgaccaaggcggacggtacgaaaattccgcgcggcaattaccaacttcacgaagtattcaagccgaccgacgcaaacgggaatcgtcttgacgaaatcccgtttatgttcatgggttccgaaaacaacgacgttaacccggataacccgaacttctacgaccttgcgtcgctgaacttggcgcactatcgcaacagcgcggattacgaagaatcgtgctacgtcgtaggccagccgacgcccgtacttaccggcctaacggaagaatgggttaataacgttctgaaaggaactgtcgcgttcggatcgcgcggcggcattccgcttccgaccggggccgacgcaaagctgttgcaggccgaacctaacaccatgctcaaagaagcaatggacacgaaagaacgccaaatggtcgcacttggcgcaaagcttgtcgaacagaaagaagtacagcgcaccgcaaccgaagccgaattggaagcggcgtcggaaggttctacgctgtccagcgcaacgaagaacgttagcgccgcgttcgaatgggcgttgaaatgggcggcgcgctggatcggcgcgggcgacgctagcgttaagttcgaactgaatacagatttcgacattgcccgcatgacgccggacgaacgccgccagattatcgaagaatggcagaagggcgcgattacctttaccgaaatgcgtacaggacttcggaaggctggcattgccaccgaagacgacacgaaggcgaaggccgacattgccaaggacaccgccgaagcgatggcccttgccatgcccgccaacgaaccgggcgacgggggtgcgtaatcatggcgctatcggataataagcgcctgtacgacatttcaacgcggcttgccgtatatgtcgaaggcgtcaaagttcagcagtcccgccaatttaacttcgtattgcgcgatattagcgaagttctgaaaaagcttcttggtcgtgttcgttacaagacccttgacggtctttcgaaggcgcaactaaataagcttgtcgcagaactgcgcgaatcgcaatcgaagatttacagcgcgtacacgtcgcagcttatcgaacagcttaaagcgttcatggctgcggacttggaagtaaaccgccgcgcatgggttacgggatatatcgaacttgacggcgattcgccggacgaaatcatttcggacgaagacgcaatacagttcttaatcgaagccaacgacagcggcgcaaatccgttgttcggcatcgcggccattactggcggcgacgaacgtatttggtcgcaagttacgaattcgccgcttccggcgaacgggctttatcttctgccgtttatcaagacgtttacaacgtcggcgcaagcgtcaatcgaaagcattattcgcaaggcatgggcgaaccgctggactgttgacgaaactttgcgcgaaatcatcggcgaagaaggcgcacgccaaggcacgccgtcgcagcttgcgcggataaacaatcaagccgcgtcggttatccataccgccttcgcgcatactgcggcaatcgtagcggctggcgtagcgtctgcggttttcagttggtacgtttggttttcggttatggatggcaacacgaccgaaatttgccgaagccgcaatcgcaagcgttatcggtttggggccgggccgttgccgcctgcgcacattcgttgccggtcgcatactgccccggcgaatacggctagtgacctaatcgacgaaacgttttatacttggcttgcgcgtcaaccgctggaagtgcaagacgacatattaggcaccgaaggcggcgaagctttacgcgatggcaaattgaaagcttccgatattccgaagtacgaagccgacgaaccgctaacgcttgacgaattccgacgcaagattaaacagattctttcccgctgatacggtgtatcggcataacctgtaggagtcctacgaaatggcactgaaaaagcgtattaccaaagaagaacattcgaagcttgccgacgcgctgaaattcgaatacgtcgaagacggcgacggtttccgtctggacgttgacggcgacgaagacaccggcccgcttcgtcgcgcgaaagatcgtgaagcgcagttgcgccgcgatgctgaaaagcgcgccaaagaagccgaagaccgtttggccgaactggaaggcgacgacgcccgtaaaaagggcgacattgctacgctcgaaaagtcgtggcaaaagaagcttgacgacgcgaacgccgcatcgcaagccaaaatcgacaagcttacgtcgcatacgacgaaaacccttgtcgataacgtcgcgctgtcggtcgcaaccaaaatcagcaacgcgccgtcgatcatccttccccacattcgcgcgcgcctgcaagcgaacttcgacggcgacgaaccgacgaccgttgttcttggcaaggatggcaagccttccgcaatgaccatcgacgaactgtcggcggaatttgttgcaaacaaggatttttctgctatcatcacgggcagtaaggcgtccggcggtgccggtaagccttcgcaaaacggcggcggtgccccgaagatttccggtcaatccgacaaacccgccgacctttcgaagatgaatccgcaagaacttgcggcgcatctgaaagaagcgaaggctactactgaataaggacgctttatcatggcactttccgacctcgcggtttactccgaatacgcctattcttcgttctccgaagtcctgcggcagcaaatcgacctgttcaacgctgcaacgggcggcgcgatcatccttcaaggtgcggcgcaccaaggcgactttagcgacgtggcgtttttcgccaaggttgcgggcggccttgtccgtcgtcgtaacgcctacggttccggcgctgtcgccgaaaaggtgatgaaacaccttgtcgatacttcggtgaaggttgcggcaggcacgccgccgattcgccttgaccccggccaattccgttggattcagcagaacccggaagtcgcgggcgctgcgatgggccaacagcttgccgtcgatacgatggccgacatgctgaataccggccttggcgcgacctacgccgcgcttacgcaggttgcggcggtcaagtacgacgccaccggcaacaccgcgccggacgacggcccgacgtggaacaacctcaacaacggccaagcgaagttcggcgaccaatcgtcgcagattgcggcatggatcatgcacagtacgcccatgcacaagctgtacggtaacaacctgaacaactccgaacgtctgttcacctacggcaccgtcaacgtgattcgtgatccgttcggcaagctgctggtgatgaccgacagtccgaacctgtttgcggcgggtacgccgaacgtctatcacattcttggccttgtgccgggtgcggtgatgatcggccagaacaacgacttcgacgcgatggaagaaggcaagaccggcgacgaaaacctaattcgggtttaccaagccgaatggtcgtacaacgtcggtgttcgcggcttcgcatgggacaagggtaacggcggcaagtcgccgaccgacgcggccctgttcacttcgacgaattgggatcgttacgccacgtccgaaaaggatttggcgggcgtgatcgtcgaagttcactaaccaacgaacgaacgggcggggcttcggccccgttcgtttaacgttcccaaacgaaggagttacgaagcatgaaacctgcaaagattctgtttttcgtcgatggcccggccccgacccccgaagattacgccgaagcgtccgaactgaacggcactgtcgtttttcgcaacgcgcgtgccgtaccgtccgaagcgcattcgctggaaatctgcgacggcgtagcgggcaaggttccgccgatctacgcggaaaagtaccccgaagccgccgaagcgatcaagaagaaggccgccgaactgaaagaacttacttcgaaggtcggcgacagcccggcaccgaaggcgaagggcggcaagaccggccagcaagcgccgcagcagccgcagaccccggcccctgcaactggcggccagcagcccgcagcgggccagcaaggcggcggcgcgccgtcgtggaacccgaacccggcgcagtaaggccgggcgcagcgtagggcgcggcctgttcgcctagtgtgggcaggccgtttttataggcgcaacgaaaggacagacgaacatgcaacgcattgtctattttaccgcaggtactaccccgacttcgggcgaactggccgacattgccaagcttaacgcagccgccgaagccgcctacgaagtgaccgtagcgaacggcgcagcgaatgccaagtatggcgaaaccgaccgtttgattccgtgcgatttggtcgcgggcaccgttccgaccgaatacaacgcaatcgacgttattgaccccgacgcaatcccggcgcgcggtttgtcggatacgcaagccgttgtcgaaaatggcgaagcgttgacagttcccgttactggaacttacaccgataccgcaaccgttaccgtcgtcgatggcgctgtaactgccattgcactttcgtaaggattcggcgtcatggcaattactatcgtagtcgaagacggaagcggcgtagccaacgcgaacagttacgtaagcgtcgcggatgcgcgcgtatacgcgaccaatcggggcaccgaacttccgtccaatgacgacgaagtagccgcgatgctgattcgtgcgacggactacctagaagcgcaggaatgccggtatcaaggcaaacgcacgtcgccgacgcaggcgcttgcgtggccgcgtaccggcgtattcctgaactgcgatgaagtcccgtcgaacgttattccgaaatcgcttatcgccgcacaagttcaattggcgatggcgattaacgcaggtttcgacctgcaaccgaacatttcgccgcaggactacgtaacgcgcgaaaaggtcggcccaatcgaaacggaatacgccgacccggtagccgttggcatcatgcccacgtttaccgcagcgaacgcgcttcttgcgccgctgttcggcgaatgcgcttcgaacaagtttgcacttcggacaattcgggtttgacgtatggcacgcttcgaccgcgcgattcaaacggcgttgcgattgatcgcaaagaacggcgaaaaggtgaaatggcgcgtcattgacgacgcagccgcgcccgatccgtcgcagccgtggaaccccggcccggcaacgcccgaagacaaggacgtaactatttgcttcttgccggttgatcggcaaacgatggaaacatttacgtttatcaaaggcaccgaagttccgaagggttcggtaatggggcttatgggaaacgtgccgtttaatcccaacttgaaagacgtagttattcgggatggcgtagaacttcgaatcgcaaatatcgacgttctttcgccgaatgggcaaaaggtactttacacggtagtttttcaagcatgatcgaatttgaccaagcccgcgacgaaatcaatacgctgtttcttacggcgtggaacgctaacgcgggcgcggtcgtcggctatgttcccgaaattcgttggcagggcgtacaataccgcgatttgccggacggttcgaagttttgggttcgcgtgtcgaaacaaaccgttttcgaagaacaaacaacgctttcaacttgcgaaggaaaaccgggacaaaaacgttatacggcgtcggggcttgttttcgtgcaagtgttttgcccgaaatcgaatacgcaagctttcgcacttggtcaaacgctggcgaagattgcccgcaatgcttttcgcggaaagactacgccggggaagatttggtttcgaaatgttcgcataaacgaacttgaccccgaagaactgtacgaacggtttaacgtcgttaccgaatttgaatacgacgaattaggttgaaggagttacgaaaatggccgattgcgctatcaacaaaatcgactcgaacattaccggactggcgtatgccgaagaagaatgcttgaagcaacttccggcgtccgtcacttggtacggactggaaccgaacagctattcggacttcggcggcgaactgtccaccgtagcccgtgcgcctatcgacccgtcgcgccagaacaagaaaggcacgattaccgatcttgacgcatcgggcggcttcaattcggactttacgaagtcgaaccttactcgcattctgcaagggttcttcttcgcagacgcgcgcgaactgccgtctactgcgccgatgaacgccgcagctatcgcaatttcggctgtcgatgctgcgacgaatacctataccgttgcaagcggcggcgcggcctttgcggcgaacatgcttgtcaacgcaaccggcttcgccaatgcgtcgaacaacggccttaaaaccgtcgcttcgtccaccgcaacgactgtcgttgtcaacgaaacgcttatcgacgaagccgcgccgcctgctggcgtaaaactggaagtcgtcgggcgtcaactggccgcagccgatgcgaacatcgccgttacttccggcgtcgcttcgttggtcgtcaccgctggcgactttacgaccatgcccgaactgttccccggtcgttgggtgttcatcggcggcgacgcggcgtcgaaccgctttgcaaataatgtgggctacgcccgcattaagtcggtttcggcgaaggcgcttgttttcgacgatacgaccttcgcggctgcgaccgaaaccggaaccggcaagtcgattcgtctgttcgtcggtgtcgttatcaagaacgaaaaagacccggcccttatcaagcgtcgttcgtacaacatcgaacgcacgttgggcaacggcgaaaacggcgttcaatgcgaatacttggaaggtgcggtagccaacgaatttacgttgaacattccgcaggccgacaagctgaacgccgatcttacgttcatcgcgtgcgataacacgcaccgcagcggcgaccccggcgacgaacagaaggccggtacgcgcatttcggcaccgggcgaagatgcgtacaacacttcgtcggacatttaccgtatcaagatggcagttcacgacgacacttcgtcgaatcctgccgccctgttcggttacgtgtccgaagcgaacgtttcgattaacaacaacgtttcgccgaacaaggccgtcggtatcttgggcgcgttcgacacgacggcgggtaacttcgaagtcggcggttcgattaccgcttactttacgaccgtcgcagcggtgaaggcggttcgtgcgaatgccgacgttggtttgtcggttatcagcgcggcgaagaacgccggtttcatcttcgatattccgttgcttggtttgggcggcggtcggttgaacgtcgaaaaggacgcgccgattaccgttccgcttgaacccgcaggcgcggaaaacgaaaacggttatacgatgctgtacgaagtgttttcgtacctgccaacggtagccatgcccgattaagtcgggtacacttgaagggccggacttttccggcccttctttcatccatcggagtaaatcaaatgtctggactgtttaagcaattcaaaacgaattcggcgaaggaaaccgaaggcgtcgaaatcgaatttcccgaagcgcagaacgacgacggcaccgttcccacgttcatcatttcgcgcatgggcaagtcgaacaaagcgtattccaagtcgctggaagccgcgacccgcccgtatcgccgacaggtcgaattgggcaccatgaaaaacgaagtcgccgaacagcttttcatgggcgttttcgtcgataccatcctgcgcggctggaagaacgttcaggacgaaaagggcgaagccatcgcctattcgaaggacgcggcaatttcgcttctgtccgaactgcccgacgtttacgaacgtctgcaagaagaagccaagttgtcggccaacttccgcgattcggtgttggaaactgaatcgggaaactgattgaagttctagcgtatctgttcgaactaggcccgcacgaacagaccatagcaaaacaggcgatgcgggcgggccagccgttacccgaccgcatcgccaacgcgccagaacttgaaccgggcttgcagttgtatttgcaagccttcttcgatttggatagcgaacgaacgcacgcaatgggattgacgccgattccttggacaagtattgcggcgtatgcgtcggcattcgaattcgacgaagaacagcgggaagacttgttttattttgttcgtaaactggattcggaacatttgaagaaactagaagcaaagcataaggcgaataaaggcaatggcaaacgaccttctaagtctggccgttagtctggaacgcaaggctaaggcaatcgacgaagcggcttctaaaacagccgtcgatactgcaatggctattgtgggcgacttggcgtataagacgcccgtagatacttcgcaagctttgtcgaactggcgcgttacgcttgattcgccagcaaccgggacgattgcaccgcattaccccggcattcaaggttcgtcgcaacgggcaagcgcagccgaaacgatcaacgcggcaaaaagcgtacttgcaaacaagaagcccggtcaagcgatttttattacgaacaaccttccgtatatcaaacggcttaacgacggatattcagcgcaagcgcctgcgggattcgtcgaacgtgcggtattgattggccgcaaaatgcttgcgaagttcaagattaaggattaagacgaaatggccgaaaatatcgaaatcaaagtacaggataaagtcgattcgtccatttcgaccaagcttaaaggcatcgcttcggatgcccgcaccgccgacagcgccgtaaaggcgttgcaatcgtcgttgaagtcgatttcggcttcgtccggtctttcgcgtcttcaaagcgaacttgcacgtaccgccattctacagcagaagcttgccaccgaaacgcagaaaacgcaagtcgcaatggcgaacgttgaagcggcgttgcaacgtgccatcgcagccgaagccaaggcgaacgccgcgattaaccaactttccgccgcgcagtccaaggccgctaccgaagcgcagcgtttggcgactgcgcagcagcaaaccgccgccgcagcagcgcaggcgcaggccgcacaagcgaacttagccgcagcgcagaccaacagcgcgaccgcatcgcagcggcttgccacggcgcagcaacagacgaccgcagcaacggccaacgccgccgcagcgcagacgcgcgcggctacggcgcaggtacagggccagaccgccgcgcagaaccttgcagcggccaccacgcgcgccagcacggcccaaacgcagggggcgaacgctgcgcagcgtcttgccaccgaacagcagcgtacagccgtccagacggccaacgcggcggcggccaacgaccgggcggcccttgcagccctgcggctggcccaagcgcagcagcgggccgggcaggcgtcgcagaccgcaggccagcaaatcgccggatacgtcaaagccgccgcaggcatcgcaggcgtaacgctgtcggctggcgctattctcgcatcggcggacgcatatacgacgctgcaaaacaagttgcagaacgtcaccgaatcgcaatcgcaagtcgtaacgcttacgaaagaattgttcgacttggcgaaccgcacgcgcgcaggcgtcgaagaaaccgcgacggcgtttacgcgctttgatcgtgcgttgaagttcatgggcaaatcgcaagaagattcgttgcggttgaccgaaaccattaacaaagcccttattgtttccggcgcaactgcgcaagaagcgtcgtcggctttgttgcagctttcgcagggctttaacgccggtaagctgcaaggcgacgaattccgcgccgtatccgaaaatatgccgatggttcttgacgcagtagcgaaggcgcttaacgtgcctatcaaccgcgttaagcaactttcgaccgaaggcaaaatcacgtccgaagttctgtttaacgcattccagcttatacagaagtcggtcgatgacacgttcgcaaaaacgacgcccacaatcggccaaagccttaccgtcttgaagaacagcgcaatcgaattcttcggcgaattgaacaaggcgaccggcgttacggctgcgctgtcgaaagcgattctttggcttgccgacaacatgaagaccgttgccgtcgtagttacggcgcttggaacggcgatgcttcttgcattcgggccgcagattgtcgcggctatcgtttccgcaacgactgccgtaaaggcgtttaccgtcgcgcttgcatcgaacccgattggccttatcgccgtcgcactggcaaccgtcattgcgtaccttacgctgttccgcgacgaaattaacttgggaatcgacgacgttacgacgttgggtgatttcttccgcgcgaccttcgaaggcatcgggcaggttattagcgacgtgaccttgattgtcggccaattgtgggcagacatgaccgaaggcgcgtccggggcgcttggcgaaatttcgtcggctgttggcgatgctgtttccggctggacggaagactatgcgtcgttcttccagaccgaacgcaccggatgggccgccgcgctggaaaacaccgcgaaagttcttgacgcaatcgccggattcattaccggccttgcgacgttcgccggtcgtgcaatggccgaagtcgtgattaccgttcaaaacggaatcgcaaacggctataactatatcgtcggatggattgaacgggttacgaatttggcgattgaatcggcgaacaagcttcgcgcgatggtcggcaagtcggcatacgaacttgtcaacttcgaacgcatgggccaagccggacaaaccgaattcgaatcttggggcaagctttgggccgaatcgctggaagacggctttaagtcccaaggcggcgcaatgcaaggcgttgtcgaagggctgttcaaccgcgcgcagcaaatcggcgcaaaccgtcgtgccgccgaatcggcgcagcttcgcggcgcaggtgcaaaccaacttagcgcagctaccgacgacaaggcggcaaaggccgcagaacgtcgcggcttggcgttggaaaagatcaatacgcagcttgataacgaattgaaccgcatgtttacgcttcaaccgcaacgcgaagcgcaagcgaaaatggatcaaatcgaagaatcgttgattcaacgtaaaatcaagcttaccgaagacgaacgcgcttcgatcatggcgaagattcaggccgtccagcaagcgcaaatcgtgcaacagaagttcgacgcgatttataacgaagctgtcggcccgcaacgcgattacaccgccacgcttgaagcttcgaaaaagcttcttgaccttggcgcgatttcgcaagaacagtattcgcgcgcagtgacgaaggcgaccgaagaattcaagaacgcgcaagacccgatgcgcgcgtataaccgcgaccttgaccaacagttgcagcttttgcagttgttgccgaagcaacgcgaaatcgaacagcaggttatgcaagtgcaaaacgacctgttgacgaagggcattacgcttaatgccgaagaacttacgcaactgcgcgaacggcttacgctgttgcagcaggcgaacgcgcttgcgcagcaagaagccgcactaatggacgcaagcgttacgaagcgccaacagtatatcgaccaattgaaggcgattaacgcgcttaaaaacaatccgcaaagcggcttcacgcaaggcgacgcggctaacgccgtaatgaacgcgaatagcgatcttgacttcacgaataccgatacgtatttcgaaggccaagcgcagaaatacgaagatatgtattcgcgtatcgaccaattgcggcaacaggatttgattagcgaacagacagccgcgacgctgcgccaacgtatttggctggatcaacagaaccaaacgcttaacgctgcgtcgggtttcttcggacaaatggcgcaattgcagaagtccgaaaatagcaagatggccgccgttggcaaggccgcagctatcgcgcaagcgatgattaacacgtatcaagctgcgaccggcgcgtattcgtcgcttgcgtcgattccatacgtcggcccggcgttgggcgcggctgcggctgcggctgcgattgccgcaggcttggcgaacgtccaacaaattcggtcgcagaataccggcttccaatcgggcggctatacgggtagcggcggcgtgtcggaagtcgcgggcgtcgtacacggtcaagaattcgtaatgaacgcagcttcgacgaaccgcattggcgttgataacctgcaagccctgcaaagcggcgcggccagcgtccagcgcaacggggataatgtgggcaccggccaagcggccccggctgctgcgcccgaagtaacggtaaatacccccgttactgccgtcgtggtacaatcgaaagaagccgccttggctgcgatgcgttctagcgaaggcaaggcgtttgttatcgaaacaatcgaagaaaacggcggcactgtcgcacgaattgtcggagttaaataaatgggatacgcaatcggaacagtgaccaaaggcggcggcgatgattgccattatcaagttttggcgattatcaaaacgctggccgaagctaacggatggacgacgcttcgttacgttagtaccggcgctaaccgcgaattgattttgaaaggtgttggcctttctggcgaagaagaaatcttcgtaggtttcaaaacttatcaaagcgtaagcggtgattactacaacataaattgcggcgtattcatcggatacattgcgggaaatactttcgaaacgcaaccgggcggcatttattccggcacgcctgcccacaataacgcaattacgtatttcatcacggcgaacgcgcagcgcattaccggctgtttcaaggtcggtacgccggtttacgaacatttttacgttggcaagttctttccgtatgcacgtccgggcgaatatccgtcgccgcttgtttgtggcgcaatgttcaacgggccggaactgaaacgatttgacgatacgtcgcaagttttcccgtatcccggctattattattcgacttcgtacaattggctgtttaatcgggatcaagcgggcaactggattcgtccgtactgctatccgtttacgcaagcaaacgacacgacgaccgcacttgcagggccgcaaggcagttatacgttagttccggcagatacgtattatcaacttgaacccgtaatcatggcgcaaacaagtagcagcgccgttccttctaacgtatggggcgaattcgacggaatttatttctgttccggttttaacaacggcgtcgaaaacgtagttcaagaaggcggaagttctgtagtcgatcaaaccggacttagcgttaaagacgcagtagacgcaattatagctgtcggcggtcgcgctttcgtcatgcttcaaaacgtctatcgtacttcttggcgcgattttatcgcaatggaaatgaaataatggcctacattaccggaagcgccgcaactttcgcggatttgcgcaccgcaattcataacgcttgcaccgctaacggatgggcgttgaatgacggcattttgtctaaaaatggctgttatttcatgttgaccgcaggaacgcaaagcggatacccgatgcttcgtataaacggcggaaccggccaaagcggttcgactttgaacggccagccgccgaataactatggtgccatgctttgcagtaacgcagggccgggcactgaaattacctttccgattaattacgaaattcacttgttcactaatcccgacgaagtatattgcgtaattaactacaattcggatttttaccaacaactgtcgttcggtaaatcggacgttcccggcattggcggaactggtgcatggttcaccgctgctaaacgttccgatcaagctttggacagtaattcatacggcaacaaagtatttatgtccgcatattggccgtcaacggtcggagtatcgccgtatgacggttttccgttgggattgttttttgattttaacggcgatcttggcggttcgtatttttcaagttatgttcatacgaaccttgattcgacgccttggcgaagcggaaacacaagcggcgcagcttggggcggtgcgcgcgctgttgcttcgttgcttcttgcgcttcccaacttgtccaatcaagctacgattttgcttccgattaaaccttgtgcgcgtcgcaacgacggcggacttacgattattgcaaatccgaaaaacgcgcgttatttgcgcatggataacgtagtccccggcgaaattgttactttcggttcggatcaatggaaatgctatccgttcatgcgaaaggacgcaaccgttcgcaacggcgtagaatgggcaacaggtgcaacgcatagcggcaccttcggttatgcaattcgttacaccgggacttaaaacatggccggacgattgggaacatttcttgccgcgcaaagcttcgaatacggttcggttaatgcaaatatttccgaagaagtaaacgagaataccgcagcggaatacaacccggctttttacgacactaaggacgacggcatttacggcggtcgttctttttatcgtattcagcaggctaaccgctggtctattgtgggcaacgaacaagtaaacttcttccgtgatttctattttcgaattcacgtacaaccgttgcgactggacttgcaaacggtcgcgtcgtcgcagacgcgcgaaattagcgtatggaacgcatatccgtacactttcgcacaattgaacgacattcttgtttcgaatccgcttggtatcgaaataagcggacaggcaacgccgtacagtatgccgccgcttaaagaattgacttacgatgttactatcggcacttcggggccgccgaacattaacgtcgaaattcaattcgatttttcaaacgttgacaatccgttgccgatcttggttacgggtacgcgcgccgttaaattcgacattatccccgaaacgccggtaacggaagaatgggaatggttgacgaataacattaccgcagttgacggaaccgaacagcgtattgcgctgcgcggtgaattgccgcgcgtaactgaaagccttaaagtaattttcgacgatcaatcaaaattgcgcaaattttatgccgatcttctgtcgtgcgtcggtcgtctttggattcccgaatttcagtacgcgacgcgaattaccgcagcaagcgcgaccggaactttccaactgtacttcgatgatgcgcaaaccgacgtgcgccccggtgaatatgttttgattcaaacgccgttgaccgccgcacttgtcgaaatcgacgtattgaatgcttccggggctactgtaacttcggcgctgttgttcgacattcccgcaggttcgctaatcatgccgggttcgcccgcgctgttggacgatgcttcgaaactgtcgcgctatgctgtaaacgaagtcggcgaaacgacgctaaacgccaagatgattcgccagcggacgcagctacagcgccccggatcaacgaccgtacttccgacgttccttggcgaacctgtcatggataagcgcccgcttgccgatgaattggtagatgacgccgtatacacgggccaacagactatcgacaattcgaccggccttcccgacattatttcgcgttgggactatagccgtattggcggcccgcgtagcttcaaagtcaatcgtattaaacggcccgaagaaatggattattggaaggccgttcttgcgtatgcgcgcggcgcggtgcgcaaattctggatgcccacatatcgaccggacatgcgcgttattgtccagccgtccgacgcatcggcaacgtttacgattgaaggcgtagaatatgccgaaaagatatatcagattaaaacgcatcgttacattgaaatcgaaacagcttccggcattcatcgaactaaagtaataggcgcaaccgtatttgattcggcgaccgttattcttttcgatccggctttgccgactggcgcaggatggacgaatatcaagcgcgtttcgtatttgctgcctgttcggcttggcgaagataaggtaacatggaagcattacggcctagaaagccttttgcaactttcaatagttacggcggaaccttaaatgtccgattatgacgacaaagaattaagcgtagacgatagcgccccttacgaattatacgaatgggtcggcacttatcgaagctactatatgacaagtgacgcgatttcgcatgttttcaacagtgcgacgtacaatcctgttccgggtttgaagcgcagtacgttaaaagccggtacgcacgaagaagacaatatagatttaacggtaacgcttccaatcaccgaacaacttgtaaaagattacggctttcaaactacgccgccttcgttggatttaacgatttatcgttttcaacgcgacgccgctacgtttgttccgtattggaaagggccggtcgcttcaatcgtgattaacggcgaagacgcgacaattcgcacgccaagtaaattcggcaatattttgcaaggcaacataccgaacgtctacgttcaaccgccttgcaataacgttttgttcgacgaacgttgcaaagttagccgaactgacaattctgtaagtacggtcgtttccgtagttgaaggggtacaaattactgtcgcttcgattggttcatttccaagcggatggtttgtcggcggtgaaattgcgattcctgcgcgcaacgaacgtcgaatgattatcgcacaagctggacaagttttgacagtgaattacggcttttctcgtataacccccggaacttctgtcgaagttacggcaggctgcgaccatagttacacaagttctaacggttgtccgaaattcggcaatcaaattaacttcggcggatgcccgtttgttccgggcgaatcgaacaacccatttacgaacggaattagctaatatgtgggtcgcaatcgttatcgcggtaatcgcgttgcttatggtcgcgtttatgccgaaaccgaacgttgaaaacgcgcgggcggcgaagcttggcgacttccaagttccacggtcgaaatacggcgatccaatgcccctagtgtggggaactgttcgccagaagtcgccgattacgttttggttcggcgatttccgcccggttccgattaagaagaaagtttcttcgggtttgttcagttcgaagaaagttattacgggttataaaaactacgtcggtatcgactgctgtttgtgccttgggccgggcgtcgtacttcgtaagttttgggccggtacgtatcttgtttggactggcaccgcgaccggcattacgaatattgtaatcaatcaaccgaacttgtttggcggcgacgatcaacgcggcggcctgcaaggtacgttcacgttctacgatggccgttacgatccgccgcgcgattcgtacttggcttcggttcttgatccgaacgttccggcgtataacggctttgcgcgtgccttgttcaaatcgttttatattggcacgacgactaatcttgaaatgttcagcttcgaaatttcgcgtatgacttccggtcttcacgcgacgtattcgattatgccgaacggtcttgatttaaacccgatggaaattgcgtatgatgccattacgcagaagttcggacgtttcggtaacttgccttcggttttggacttgccttcgttcattgcgtgcgcgcaaacgctgtataacgaacaaatgggcatgtctatggccgcgcaatcggccattacgggtaaagacctgttagaagaaatcatgcggcaatgcgacggcttgctgtatcaagaccctgcgacttcaaagattgtcgccaaacttattcgacaagattacgacgttaatacgttgccagttcttgacgaatccattattaaggaattgaagaatttttcgaaaacgacttgggacagtacgtttaatcaatgccgcgttacgttcaaagatcgcgcaggcgattacgacgacagcgtagctattgcccaagacttcgcaaatataaactatcaacagcgcgtcaagtctaccgaaatttcttcgcccggttgcacgactgccgatgttgcgaacaagcttgcggcgcgtcaactttcgttgattagtgttccgctgtataagtgcgacattacttgcaaccgcaaggcttcgacgcttcgtccgggcgacgtgttcgttctgaattgggggccgttcaacctgcaaaaaatggtcatgcggatttcgaaaatcgaccttggcgaacttacttcgaacgaagttaaaatttcttgcgttcaagaccgattcgctacggcgacgccgacgtttgcgcccccggatggttccggctggacgccgattagcacggctgcgaatccggttacgctgcgaaatctgttcacgccgccgcacttcttggcgcgtctggcaccgaacgaagccctttcgacgttcgacagtcaaggccggttgtacgtcttggctaaggggccgtcgtcggcgtctatttcgttcgatgcaatgttcagcggcgacaacttcgctaccgatcccacactagccattgaagcggccccgtacaacggcggcggcacgctgtcggctgcatatgccgataccgtggcctttgcgacgcgccaagacacgtcgggcgtgttcaaggtgcaaggcgtgtcttcggcggacattgcgaacttgcagcagtatacgacgcttgcgcaagcgcaagacggttcggcaatgttgcttgtcaataacgaactgttcgtttacgtcggcttcgttgacaacggcgacggttccgttacgttcccgaacctgtatcgtagcgttctggatacagtgccgggcaaccatgccagcggcgaccgtgtttggttcgtcggcggtatcgacggcctgattccgcaacttctgaacaacagcgcgaccgggtacgttaagctgttggatacgacgacttcggcaaagcttccgctttcgtccgcgccgaccgtatccgccgcgcagaatggccgcgcacgcctgccgtaccagccgcagaaccttacccttgacggtagccgtacccctgccccggccacgggcgcaacgtcgatcacggcggcatgggcacgccgcagccgcgaagcgcaagccctgtcggtctacaacggatcggacgccgggcaggaaaccgggacgcaaacgcgggtgcggtggcgcgttggttcgggcggatacactacggtcatggtttccggcacttcgacggcgcttaacgtgaccggccttgtcggtacgctggaagtgttggtagatacgcaaatcacggcaagcggtctgttcagtacgaacgccgaccgcttgaccatgacgctatcttaaaagaacgcaagttcgccgttcttggctttcttcaaacgtccgcagtcgtacagcatttcgaccgcttcgttaatgtaccagtcgtaatttatatcgtcgggaaattcggtcggcaagtccattacaggacgcgcgccgtccgttttcccgactttgtttccgctggcaacgtaagcgatatgcccggcttcgttcttcgggtaataccaacgaacgaccttgcccaagaaacgcccgttcttttcgccgccgccgtgaacgttcttcacgcatacgaagcgccggaagtcgcggcattccttaatcgtcttttctactggcgttccttcgacaagaaaccgaataaccgcgtccgaacatatcaaagcttcggggttcttcgacagaatcgaattaagcgcggaaccgcgttcgcaataagcgcccttcgtcttagcgcctaatttttcatccaagaagcgcgcttcggcgtcgccgccgtcgtccttgattgcgacatagctattcacgtcgcgcgaatatacggccttgtatcgcgtttcttcggtcttgtatcccgtatgcgcttcccatgcggcaatcaagttgcggacttcttcatgccgcgacttgtgatatttcgaaatgaagccgtccgtattgccggaaataacttcgacgccgattccttcgattgcttcgataagcataagcaatacaagctgtccggtaatcgtcacttgcaacataagttgcggtgcgtacagcgttgaatatttgttgccaagtttgccgaagcttccgttaatcgtaatcttcaagctgtcggcaattaccttccatttcttcgcgcctttacggtcgccttctttcttgcacttcgccgccatagccttagcgtgaattcgtgtttcgacgatcttgttataaaccgtcaagaacgcttcgcccaagtgcggcgggaacagcttttgattaaggattgtgcgcgggtagaacgattctacgtcgttatccgctagaataatgtcttcagttgcgacatgcgcggttttcttttctgtagaatgaaggccgcccatcccaagtttgtacgtcgatttgccgatagttactttcagcttttcaatttcggtcggcatgatgggcgaacccaagccgtccagatagaacgccgcgccgcgcacgacttctagcatttgctgtaactgcggcgtctggaaacaaacgaagtccggtacgttgtaatacaacgggccgtcgtctgttagtgtgggcttcttcgggtaataacccaacaccttttcaagttctttattgattaccgcttcggctacctgcgcatcggatttcgaccgaagttctacgccgtattcttccgacatttcggcccgcaacttcaattcgggcgcaagttcgttaaacagaagttcggtattcgcaaggtcgttgcagcagtacgggcgaacgattgcggcatcttcgcgcgtcaatacgtgcgtttcgggaaatggcaagtcctgcatacgttcgcaatgcagccgaccggcgtacagcttcaacgatgccgggcgcgcagtaacgccgccgttcaccgggcaaacgttgaacaagtcgatatggttgtagcggccaatttgtacgccgtacttcttttcgaagtcgaacggcgtaaccttcttcgtgccgtaggccgggccgcttttaatgatgaagtccgaagcttctttaagcttggcgcaggacgcaccacgggccgcaagttcgatcatcggcaagtcatacgatgcgctgttgaagcccacaatacagaatcgccaaagcatccaaagaagcttcgtcgggttaaagtcatggtcgggcgaacgttcaaacgcgacgaactttccggtatcaagcgacttaaacgcgacataccaaaagttgatatacgtttcaacgtcaaagacgaagacgcttccagcgggaagcgccattagttcttcgtccgacatgaattcgacaggccgcaaagcatggcgaatgcttgcggccaacttatcgacgacgcggcttttcttggcaacgatgaagccttgttcgttcaacatatgacagccccttagaacggtatatcgtccgaatacggatcatccgaagttcggttaatgtacgtatcttccgactgttcagtatacgacgcttcggttccaaggtcaagccccataactgcgccgcgcacgttgtcgccgtagaaaattactttgttcgtttcggcgtcgaaatgcgctttcttgaatgcgtgttcgacggaaagcaaaagctttgcactgaaccccattcgttccggcaagccttcgatacgatacgtcgaagcttcttctttgtgcatacgcgacaacaccgcgccatcttcgaagaagacatggccgttcgggctgaacgattcgatagcacgaacgccccggtaaaagtcttcggggatcggccaaaggttcagattcggaacgtccagaaccgaagcgtaattcgggtaacgttcgccgtaaagctgcgacttgataaacgaaccgtcttcgaaatagaacgtcgccgacgactgcgaatagccgaacccggtaagcgccttcgatgccttcgcaatggccgacgctgcggccttcggaagcataaggccgggcggaaggtcgatgccgtgccacgcttccagcagggccgccccgttcgtcgctacggcgcttccagcttgcagcaggacggcggcataggtcgcattcggcgcgccgtccgttgccagccctgcgaccgcagccaaggccgctttaacccggtcgtcgattacggcgcattgcggatcgggcggcatgatgggcacttcgtcgaacgctacgcacggcacaagcgcccggaatacgccggacgatacggcaagcgtgttcgccgtaagttgcgtaatcgacagttcgtcgccagccttcgacagtgcgtcgataaactgcaacgtatgcgggcacgcggtcaagtcttcttcaatcggcgcggctacggtcaagacgccatcgaaggccgccgcccaattgtgggcaatgtggccgaactggatatttaccggcccggccttcttttgcgcgaccgaaataaacttcaatgctgcgataagcgaagcggcggggttcgccgtcttcttcgctgtcgtgccttcggcttgcttgcgggcgcggcttttgcgcttcggcttttccggcgttgcaggaatcggaacgtcgttttcaatttgcgttgtcatagtttcaccattctgcggaaagaacttcgggatacttcttgttcacccaaacgcgaagccttgcgggcgttcgaagttcggatacacgttgcaaagcctgatacgtcgtcggcggcggttcttcgcggtgccgctgtcgccaccaatcccgcgaccgtttcgccgcaagtccggggtgttcaagcatcacaaattcgttaaacatttggaagccgcaaaagtacgatactttaatcatcggcggctttgtcaagttgccttgtgcgtcgcgtttttcgtgaaggttgtatatcaccttttgcacgtcgaaatattcgactatcggcgcatcgctgcgcaacggttcggcaacgcccggcgtcgcaaacaacttcgtttcgaagctgaattcggcaccgcagttaatgcactggcgcgcggcggcatggttgtatacgccgcagacttcgcagattcgaaccggcgcgtcgccgccacctttgccgggacgattcggaatacgcgggtcgttgattgggccaagccgacgaatgttcgccgcgaagtcgccgacaagacaattcatcttgccagtttcgggacttgggcgcgttccgcgtccgtacttctgtacgtgtttgcccggcgatagcgtcgggttcaaatcgccgatgaagtcgattgccggatggtcaaagcccgtcgtaagtttctgcccggatacgatgccgcgaagttcgcccgctttgaatgcgcgcaaacgttcggtattaactttgtctttcagctttgaatgcacgggcaatacttccagtccgtaagactgaatcacgtttgcgacgtgttcggtattgtcaatgccagttgcgaagacaagccaagtcgaacggttataggccatttccatcatttcgcggacggcgttaaacactacgtcgtcatcgtctgcggccttttcaagctgtttcgaattgaattcgccgccgactacaccaacgccggaaatgtcgatttcggttttcgtcgggcgcgcgataagcggcgacaagtacccttcggcgatcaaccgattaaacgattcaacgccggtaatgtcgtaacaaatatcggtgaagattccgttatcggtaatcatgcccattttcatacgatagggcgttgcggtgaatccgataactttaagatgcgggttaatcgcgcgcaattcggcgataatgtactgatagaacgaatcttctttgtccgaaagcaaatggcattcgtcaatcaacagcaagtcacgccatccgaaatggcgaagatgcggcgggcgtccgtcgttctgttcaagcgcctttttaatcgccggggctacggactgaacgccgccgaatacgattggcataatcatttcgcggctgttcaagcctgcggaatagataccaaggggtgcagtcggccaaaccgacattagcttttcggcgttctgttcgatcaattcttttacgtgcgtcaacatcattattcgctgattcggccaaagcccgaaaatgcgacgaatgaagttcgcaattacaacagatttgccggttccggtcggcatagcgacgaccggatttccgacgtttccgcgctggaaatagtcgaagattgaatattcggcttcgtcctgataccagcgcggtacgtagatactagacattttgcgttgtcgccgtgataggtacgtaagacgggcaagcctgcggtacgaagtcgcggggaattacgccgttatgtacgtcgcaaaaccattcgccgttttcgaccggacgggccgccttgcagctacgacagttcttttcaggaatcgcgcctttgtggcaaatgtcctttgctgcgcaatacgtgcaatccttgaacgtcggattatcggaaagacgcggcggcggttcctgcgacagaatgatttgttcggccttttcccgcatttgctggcctaaccgatgatccaacttcacaagttcgacgtgtaacgaatcatcgttcttgttaatgttgaaatacagtacgtaacggaatccgtatgccgtgtcgcttccatacgttgaagtttggcaaaaatgctgcggcttcgcaacaggcataccggcttcgccaagcttgttaaagcctgcgccggttccgttcgtcttaaattccagcaatacgggttcgtcgattccgtagcgcgccggaagctttgcgataccgtcaagcgatccgccgaaatgcccattcaccgccgacacgcggtattgtgggaattccaaaccgtccgccttcgcgcgtgcgacgtgttgcgtatagtacgggtgttccttcgtaatcggtgacgaaaggccgtcgccttcttcgccgggcttcgcaatccaatacgaatcgctttcggcgtgatacataaggccgtcgcggttttcgtaccaaacttcggccccgatgccttccagccattcgataaagcgggcttcttcacgatgcccacgattaaacagccgttgtttgcgtccgtccgtctgttcgcggaacgtccagcggaacagataccaaagcttgcgcttgcagccgtcgccaatcaacgacgcgccaaggtgccagcggtggccgccgtcataggtacgaacgcaatattcgtctatgtcttcaaggatgcgcttagaaagcgccttcgcaacgccgggggcgtcaagtgcgacgttttgccttccggcgtcgggcttcgtcgctggcgcgtcgttcagcgttaattgcgcgttcggttcgcttttcttgcttggcatcgttcttcacctttcgccggacaagtgcggcgtaattgttcgttagatagtcggcggaaagcgtcgcaacgtctttaagttgatccttcgataaccaactgatatggcattcggaagcgtctatgccaagttgcgccgcaagccaattgtacgccttcgaccgtgacattaagccggtttgccaaagacggtcgaattcgtcatgcgcttttgttcgaagctgtcgcgtagcacggtcggccatacgaccaagcggaacaaacgtgccgggatgacagccgacagcggcgcgacagtcgttgcagaaataaatatgcggccaatcgccgtaacggcgaccgtaaatccggtcgtttgttgttagttcgatgttgaatgaacaacaggtatcgcattgttcaggtacgggcaatgcgtctttgattttcgacatacttacgcttttccccataaaagaacgccggggccggtgaaagccccggcgatgttacgccgctacgctagttcgtcttagcgtgcgccccaaggtgcggcaccgccagccggtgcgccgccctgcggttgctgctgccagccgcccggctgtccgccctgcggggccgcgttctgctgcggctgctggccgccccaagctgcgccgttgccctgcggctgctgcggctgctgttggggctgctggccccatgccgcgccgccttgggccggttgctgctgcgcgggctgctgctggccctgcggctggccgccccatgcgccgccctgcgcgggctgttgctgcggctgctgtccgaagcctgcggcggcctgctgcggctgcgccggggctgcgccctgtccggccttgcccggttcgttgccgttcatgtcgaacacctttttaacttcggtgtactgcgggtcgttcttctgcggcccgacttcgataaggaacgggattccgtgaagctgcgacgaatcgttgatttggaacacgccgataacgtggcagactgcggacaactggcggtgcgcgatttcgaccgtctgttggttcgtatggtacaggttcaggcgatacgcgcccgtcgtgccagcctgcgggccgtcgataatccgcaagttcagttgcagataaccgccgtcgttcgccttgttcgccttcacttcggaagtttcgacgataaccggatgcttgccgatgggcaggcttccgacgccttgggtcgggtcgtattgctgcgcgttgaaaggttgaatcagttgcatggtatttaccttttcgaaaagtcttcgccgttggttacggtggcaaagttaccgtttttggctgcgccggtaggattcgaacctacgaatgccggaatcaaaatccggtgccttaccgcttggcgacggcgcaaaagcttattgcatcgctttcgtgaaaagcgccgacaaatcgggcggttcaagttcgcccaagttgcccaagcgatcacgcgcgaacacttcgggaatttccttcgtccgcaacgcccgaaccggcttcggctggcccggtacgatagcttcgcccaagtgcaacacgttgtcgaatagatgcggaacctttacgttaaggtctttgccggggaagaacggtcgcttttgcatgatcggttcgtatacgacttcgccaccctgcaagatagtttgccgtccgttttccatgacgccttgtttcgcaatcattacgatatgcttttgcggcatgtaatacaagtcgttgcaaatcttcatcgtgcgttcggacatattgccgtatgccttcatgccgtgtttaaccttcgacagttcttcggccaagatgatttcggcaatgttcgaaatactgtcaatgcccaaggtatcgaagttcgcggcttcgcgcgacttcataaaccattcgaagaattcggtaatcagcgccggggaatacgcttcccatgcgggcacgttcgaaccgcgcatggacaacatgccgggttcagtgaccaacagcacggggcgcggcgcggtgttgataagcggcgtcttgcccgaaccgggcgaaccgaatacgacggactttacgccatagcgtcgggccagttgcgacgccggtttaagctgcgacatttgcattttgtttactccgattaaagcggcattattgacgacgccgacgctttcgctttcccgactgtccgttatggcactatgcgacgcgatgcgcggcccggactttcgatgccgtcaagaatgccgccttgattgtgggcaaggcggcaagtacgttacttcttcgccttcggttccttaatttcaagggtcggcgtaccttccgacgtaacgataacgtcgtcgatgatcttgcggaagttgtcgggaagttgcttgtattcggtaagcgaaagttccggcgtccacttaaccaaacgttcggcgatcaattcgccagcctgtccggtcttttcgatcttcgacagcgccttttcaatgcgcgctttgtcggtcttgccttcggcgttctggatgaagccgtagcgaaccggaaccttcatcgttgctttgtagccgccgccaagttcgacattttcggtcgtaccggacttcgccgggtcgtgcatgaacatcacggccagcttgcgggcttccaattcggcttctttggcgacttcaagcgcggccttcttcgcctgccaatcgaccaacagacggtcgcgttcggcgatatattcggcttcgctgtagttcttgacttcgcccgtttccgggttcgttacctgaatgacattcggggtcatctttgcacctttcttcgttgggccgccgcacgttgcgccggtatgtgcttaatgtacgacggcccgtttcggttgtcaagccttttgttcaagaatttttcgttcttcgaacaagtcccgattgttcgcgtcaaattcagtaaaagcgttcggaaagcgacgacgaagcttggcgatgttcacggcctgcgcttcgccgaagttcgaaccaatggcgcgaagcaacagcgcatcgtaccaaaagccgtcgccgacttcttcaagcgcgttcacgtcatcgaatacggcaccttcggcagtcgccgacaaggcttccagtagttcgcccgcttcggtcgctttgccgatgatcgcatgaacgatattgacggcgcgcgcgttggcttcgtcggtgccatcggtggcgatccagtcgggcagcttggcaagtgtggcggtgttgtcgccgggggcgggaacgccgcagtcgcggccatagaaaagcgtcttcttgatcgcgtccagcttcaccagtgcggcgacagcttcggcgatggtttcgcggaagtagccaagcgacacgcggtcgccgtgatagctacccgacgcggttacgtgcgcttcttcgatatagtcgaaggtcttttcgggttcgttcattgcttgcacctttcaaagtcgccgggcaccgcgccgcagcgttccgacactgtagcgccgggcgtgttgcctgtcaacaaaattttgtcttgcctgctagaattttgtcgggtatagtgtcgttcatcttgcccacattgaaccggaaacatggtgcgaacatggccgaaattacgaagctgcgggacgaaacccgcgaactgttgttgaaccgcccggcttcgctggctgttggcactattgccgaagctatgggcgtttcgaagtcttggcttaacgccttcgcgcgtggcgacattgaaaaccccggcgtcgtcacgattgaaacgcttaacgtctatttgaagaagtttgcgaagaaggcaaattgataatgtatcaaaacatacctatcgaaatgcggacgtatccgcaatgggttatgtggcggtacgaagacacggattcgaagaaacctactaaggttccgtattctgcccgtaccggcgcactcgccagcgttacagacgcgaacacttggggaacatttgacgaatgtttgcacgcgcttaattccggctggtataacggaatcgggttcgtgttgaccgatgccgacccgtattcgtttatcgaccttgacgacacgaaaggcgatcaaacggcgcttgatcgtcaaattaaaatctacaacgaattcgacagctacgccgaacgttcgccgtccggttcggggctgcatatcatcgtaaaaggcgcggttcctgctggccgtcgtcggtcgtttatcgaagtgtattcgtcgcttcgttatatgaccatgacgggcgatgtttaccgtaatgtgccgatcaaagaacaaaacgaactgttgaacattctttggggccaaatggggcaaggttctgtcgccgttgcgcattacgcaggcgtcgccgaagccaaggaaaccgacgaacaggtttataaccgtgccgtcgccgcagccaacggggataagttcgccgaactgttcgcgggcaaatgggaaggcatgtacgcttcgcagtccgaagccgacttcgcattggtcgatattatcgcgttctatacgcagaaccgggcgcagattgcccgcatgttccgactgtccggcttgggccagcgtgacaaggcgaagcgtgacgattacgtatcgtacatgctgaacaaatgctttgaccgcatgttgccgcccgtcgatattgacggactgaaaaacaagcttgacgaagcaatagccgcaaaagaagcccgcgaccgtgccgaagccgcatcgttgaataccaacgttccgcaagcgccaatcgtcgcgccatccattcccgaaacgtcgaaggtgtattcagtgccgcccggacttgtcggcgaaatcgcccaatatatctacgcacaagcgccccgcccggttcccgaaatcgcgttggctggcgcgcttggtcttgtcgctggcatcgtaggccgtgcgtacaatatcagcggcaccggccttaatcagtacgtattgctgttggccccgaccggaacaggtaaagaagccatcgcatccggcattgataagctaatggcgcaagtaatccgcaccgtaccggctgcaagcgacttcatcggccccggcgaaatcgcatcggcgcaagcgatcattaagtatatgtcgaaggggccaacgtcgttcgtatcgttggtcggcgaattcggcatctatcttcaacaaatggcaagcttgaacgcgccgccgcatcttttggggctgcgccgtttcatgctggacgcttacaacaaatccggcgaaggtaaggttcttcgtccgtctatctattcggacaaggacaagaacactaccgcagttcttgcgccgtcgttttcgttgcttggcgaatcaacgcccgaaaagttttacgaaggtttgcacgaaggtttgattaccgaaggtcttttgccgcgctttacgatgattgaatatcatggtcaagtgccgccgttgaacaaggccggggcgcgcgtgcaaccgtcgttcgaacttatcgaccgcctttcgacgctttgcgcgcattcgcttatgttgaacagccaacataaagcgatccatgttcaattcgccgaaggcgtcgaacaagcttccgacaagttcgaagaacattgccgcaacaacgtaaacagtagcgaccgcgacgttaagcgccaactttggtcgcgcgcccatatgaaggcgttaaagttggccggtatcgtagcagtcggcaataacccatacgaccccgttattacgtcggacgttctgtcatgggcaaccggcgtaatcgttgcagacgtgcgcaacttgcttgcacgcttcgacgctggcgaaattggcgtagacaacgacgaaacgaaacagcttgcgaaggtaattgcgacggttaaagatttcgtcgtatcgccttggccggaagttgcgaagtatgcaggcgaaggcgcaagcaacttgcattcgaaccgcattgttccgtacagctacgtacagcgtcggcttgccgccgtgtcggtcttccgtaaagatcgcatcggcgcatcgggcgcaatcaagcgtgcattgaagacgctatgcgaacggggcgacctgcaagaagtgtcgcgggctacgctgtcgaaggactacggaacgtccgccgtcgcgtacatgatcgcgcatccgggcgtcttcggcctgtagcggggccgggatagtgtgggcagaactggccgccttcgggcggctttttcgtgcctgaacgaaagtttaacgtatttcccgacgaacggtcgaaaagttgttgacgaagcttcgaagtcggcgtagtattcaatccatcgaagcaacgaacccgacgaaggagttacgaacatggctaacatcatcgcagaacttaccgcccgcatcgaagaataccgcaaggacaataagaacccttgcaagaactacggcaccgaagccgccgccgaaaaggcaaccgcaaaggccgccgctaacatcggcaattattttgccaagaccggcgaaggcaagcccgcccgttacgtcgtgttctacgtcgaagcttggggccgttgggtcggttgcatcgaactgtcggaaaccctgcgccgtcccgaatcgaccgggggttatcttggcgtcgaacccggcttcttcaagttctaacgaacctgcggcccttagcatcgcgctaggggccgcgcagcctgcccacattaacgaaaggtgccgctatggaaatccgcatagacaacgtgaacgaagttctagccgcaatcggcttgaccggacagcacgaacgcaagggccaaggctggcaccgcgtttacattcacgccccgcaagaaggaaccgacgtaacgttgtaccttggtcgcgtcatgtttcaacatggcgtaaaccggcaagcatctagggccgaagtcttgggcgcggttgaaggccaaggcgcaggaacgcgcgcaggccaagcgcgacgccgccaaggccgcacgggacgccctgaacgccgacagggtagccgcaggcaagaagccccggacgcgcgccctagcgcccgtgaacccgcgccgggcggcgtgcatgatcgtcggcgaatggctgtccgctgaacttggccgcgaagttcacttgttcgcattctaacgaaggagttatcgaaatgaccgcatttattgtcgcgctttgcgcatcgttggcgctggcgttctggcgtctggccgctactgcattcgaagccgcttactactgcgcaaagaacggtgaacgttcgaaggcatggcgcttcatccttcgcggcatcttctgcgcgttttggctttcgctaatgattgcgcccgtcgttcgtttcttcgatagcttcgacgtgattagcatagacgaagcgccgcctatggttgcgccgaagcgttcaacagaccttcgcgtataatagacgatggaaagtttaagggggtcgtatagcacgcaaagccttgatacgcctagctttccgacgattcataacaagtataaagtttaacggcaaagtcacccgatcccccggcttgtaacctaataaccgttatcactaaataacactacttttcagtattatacttattatacttattatatttcttttattttcaatggtttaggacttctacagccccttcaatccgtataatgcccccggaacgatgcgttacgcttgactaacccgttatcacctgctagagttacaaacgtcataactgttaaggagtgttcgaaatgtcgtaccaaatcgttcaagcatcggcggcggcgatggaaaagaaggaacaggccgaacgcagcgcgtacccgttcgcagaactggccgtaggtcaatcgttccttgtgccaattgccgacgtgaccgaagtaaatttgcgcatggccgtaagccgacagaacaagaagaaggacggcaagcgttttaccgtcgtcaagcatggcgacccgcataacgtgttcgaagtcgcgcgcacggcttgacgccgggccaatgtgggcaacaaccgaaggggcaaccgatgaacaagattgcacaagcattcgaccgcctgaacgaagcaacgaagggcgcaaccgaagcaatgcagaacttcaccgcagcttatgcggtcgaagacgggcacaagatgccgaaggcgcgtcgcaaggctggaagcgaaccgccagcggtgaagaccgcatttaacgaatacgcggacgcatacaaagctgtttacggcgtgcgtccgctgtcgtatacttacgacgtagcgacgaagtttattcgcatcgaaaacagcggcggcgtaagtctgtcgcgtttgcgcgaaatgacgaagcaacttcgttaccgcaaaggttgacagcttcgaagtttcatcgtagtatgaccatgcgaaccgggcgcttcccggcaattgaaaggagttaacgaaatgtgcatcgtttgtgacattaagcgcatgaacccgtcgcccgaagttatggcgaaggtcgaagaactggcgcgcggtctggataccgctttgaccgtggcgcaagaagtcgccgaagcgaaccccggcgcgttcaacgatgaacagcgcgaccgtatgcagtccgccgccgacctgctgaatcagcgtgaaggcggcatcggcgggcttgccgcgatccttgcggccatccttggcggcgcgcgtgtcgaagttgcgcacgtcgaattgcgcgacggcgaaagccccgaagacgccgtagaacgttacatggccgaaaagaaggccgaagcgtcgaagaacgaaaccaagcattgaccgtaagccccggctagtgtatagtcggggcttcttcgtaggggaacgaaaccaacatggccgacgaaatagacgcaacagccgaccgcatggacaacgaactagcgttgaccatcgccaacacttgccgcattgccgccgcgattccgaaaggctatcccggcgaatgcttcttttgcggcgaagacttcgcccgcgttgtcgaagtgaccgacccgcgcagcggcgaacgtgtcgattcctgcgggcgctgtcgtgatgcaaggggcataaaatgacaccgaacaaacttgcgaaggaatccgaacattcgcaacaggtcgcattgttcgcatacgtagctgtcgcgtatcttcacggcttcgacgtagccgacgaatggtgcaagactggcaagctaccgaagcgcgatccgaacgcaccgcccgccgtcccggcgcttgaatggttccacgcgatcccgaacggcggtagccgtggcgacgacgaacagtcgcgcaagatacgcggcggccaaatgaaggccgaaggcgcacggcagggcatcgccgatacgttcttgccttggccggtctacgaacaaagcccgaccgattcgcaacaaatggtcgtaaaatggtgcggcctttatatcgaaatgaagaagccttcgcttcgcccgaagtctgccgaagccaaaggcggcgcatcggacgaacaaatagccttcggccagtacgcgcagcgcgtcggctatgggtgggccgtctgctatgattgggaacaggccgttagctaccttcgtagttatatcgaatgggggcagaaatgaacaaagacgaagccgccgcactgttcgaacaagtcaaggcgaaccgtgctaagattgacggatgccgaaaacaccgcttcgacattggcgacccgccgtaccgcttcggacagaagttcgtatgcgccaactgcgggggcgaaatggacgccgtacaggcgttccgctactgccaaggctacgaagcggcggggggcgatccgaacgaagttataccgggcttccgctaatggactgcctgaaatgcgaactaacccgcgcgaagcttaaaacggctggcctgctaattgtgggctggccgttgtcgcgtattgccgaacacctttccgactgctacggcgaacggtactacgtcgaaggcgacaggctgtaccgggcgtcgaagcttccgccgtatgaaccgcacttgataaggagtaacgaaaatgacacttgacgaagccaagaagaaggcgcgcgaaaaccgttgcttcatcgtaacgaaacctgaatacttcttgctgtaccgcgaatcgacgccgaagaacgtatgcgtcggcaaacggaaggacgaaaaaggtatcatcgcgctagtgaaaaaagcttgcgtgaccgcttgacgtagcttcgaaaccgtcgtagactatgcccatagtcaacgaacaaggggcaggaaatgggcgcatacaccgtaacaactgaattcgaaatgaacgacggtcgcattctgtcgtgcgaatacggcgtatcgttcacgccgggcaactattccggtctgcccgaaaactgctacccggacgaaagcgaagcgggcgaaccgacgtactatatcgacggcgaagaagtcgattacaaggacttgccgaaaggtcttgacaagatcgccgacaagttgtacgaagccgggccgggcgaatacggctacagcgaaaccgaaccggactacgacggcccggattacgaacccgacgactattattgaaggagcaaccgcaatgcctacccttgccgaactgttttggcacttcgtcacgctttccagcggcgtaaccatcggcctaatgctggccgcatggttgcgtatgcaatcgaaagtcaccgaagaaacttacgacaccgattgcgaattcgtaaccgaatatatcgccaacatggaaagcggcccgaagatcattcgtcgcccgctgtcgcaatggccgatatgggcggacagcattaacccggccaagacgaacccgcccgaacctgaaccgccgattcgtattgaacgaaattttatcggcaaaaaggattgacaaccgttcggaaccgtcgtagtcttgttcgtaccaactggcaacctaaaggaatcgccgccatgtacgcacttattcttatcgcttgcaccgtcgttgctgtcgctattcacttcgggcttatccgtcccgtaatgcacgccatcgaacgccagcgcgaagaatcgcggcgtcgtgcggcgcttgaagctggcttggccgctgcggcgcgcttgcaggcgttcaacgcccgtaagccgtcgaaccatcgcggcgcaaagctggcgggcgaacgtgaatggcggttgcaggaatgaagcgcggtcacgtcatttacacgcacccggacgaactgtcgaaatgggatcgccggtttatcgaactggcggaacaagtcgcgtcatggtcgaaggggccgcgcaagcgcataggcgcggccatcgttcggcctgataggtctatcgcgtcacttggctacaacggcccgccgcgcggcttcgacgatgaagccttcttgcgcatgacgcgcgaagaacaacacgccgtcgtaattcacgccgaagcgaacgccattgcgcaggcgcacgacggcgaagccttggccggttacacgctgtacgtgtcgccgctgttcccgtgcgccgtctgcgcccgtcgcatcgttgacgcaggcattcggcgcgttgtcgcctattgtgggcacatttccccggactggcgcgcgtctgccgatgaagccgaagaagtcttcatcgctgcgggcgtcgaatgtctgttcagcatggattaacgaatatgacgcttgaccattcgcaaatcgaaggactgttgttcttcgaagaccccgtaacgcataacgtaatcggcgcagctaaggccgcaccgctggacttgtccgggcatttcgtcgcattcgggccacgtattaccgttgatccgcagttgaagaacttgtttcttgccgcgccgacgttgtatcaaacgctgtcgcagcaataccaagcgattcaaggtcttatcgaaatcgccgaaggcttgccgcagacgccggaacttgataagctgcaacggtcgttcgtcgaaatgcaaaacggcatgttaatggcgcagcttgtcgcacaaaaaggcatcgaagaagttgcgaattcgcttgacaagccgccgaagtagtcgtagactgtcaaacatcgaaacaacgaaccaaggtgcccacaatgaagcgtaatgttaaagtcctgttggcgattgccgccattgttgccgctttcggcgtcgttggttcgatggactaccgcgacgaagtgcgcgaacagctttcatattgtgagaatgtgaagaacggcgtatggccggacttcaaggaatggggcgaaactgaatgccgccccgaacgcatcgcagaacttgaaaatattttgcgttgatcgcttgacacgtcgaacgaacagcgtaaaattacccctgtcgcaataacgcgacgttaactttccttcgaaggagtttcaaaaatggccaagtccaagaagtccaccgctaccgctgccgcttccgccgctgccgtgatcggtcttgctgaaatcgttgcagccggtgcaaacgggctgtatactacccccgaagttcacggcccgcttgtcgaagctggcatggtcgaactgaaccccgccgggccgaacgaagccggcgaaactctcacccgcgccacgcagaaaggtatcgaatccatgaacaccccgaccaacaccgccccggccaccgtcgccgctgctgccccgtcgtccttcgccatcgaagacggcatcgccatgccgaccgcttccggtcgcggtcgtggcggcaacgtgtaccccttcgacgccctgaacgtcggccaatcgttcttcgtcccgaacaccgaagacaagccgaacgcggctaagtcgctggcttcgaccgtttccagcgcgaccgcgcgttacgccgaagtcgtcgaaggccagttcaagacgaacaagaagggcgaacaggtgcccgtcacccgcgaaacccgcaagttcgttgttcgcagcgtcgaaggcggcgcgcgcgtctggcgtaccgcctaagcgccccggcgtgcggcctacgggccgcgctacggccagaacgaagccccggcactgtccggggcttctttttgcctttctgctggcctacggccattttttcgggtactatcgggacaattcggggcgcagttcgccccttgcgcgtattaaggggctacgtagtgtcgaataacgaagcggggcaggatatgaacgaacgtccgcagaagatcatagacgcaaaattgccgctgccttggttgattggttcggcttgtgccgtagtcttttcaatgggcggcgtattcgtcaaactggacgccgtaggcgcatcgcttacgaagttggaagcgaaaacggatacgcgcgacgaacgaatttcgacgttggcgcaaagcctgatacagcaggccggaaagaacgatacgcaggacgcgcaaattacccgcaacgccgcagacattaccgacttgaaacgcgacgttgaagacatacgcaagtcgcaacgttggatgccgaagtaatgaaaaagaaagtcgaactaatcgaagattggcgcaccgcccataagctttggtcggttcgactgtcggccatcggtgccgccgtaatgggcgtgtttaccgtatggcccgaatccgcgttgtacctttggtcggccatgccgtccgaagtgcgcgcgttgatccccgaacggttcgtatccggcatcgcgcttttcgtattcaccatgtccgcactgtcgcggatcgtcaagcaaaggccgaagaatgaacgaatcgaacgaaagcccgcagaagaaacagccgaataaaaagacgcttgcgggcgtccttggcgcaggtgccgccgcaatcctgctaggcgtggccgggcaaaccggctttaccgaacgcttcgaaggcatggttcttcgcggctatcttgaccctatcggcgttccgacgaagtgcgcgggcgatacatacggcgtcgaagtcggcaagcgatacaccatcgaagaatgccgcgaatcgctggaacagggtttgattaaacacgccgaacccgtgttgaagtgcgcgccgaacctgcgaacgcagggctaccccttcgcgctggccgccgcagtcgatcataattaccatttcggcacgttctgcggaacgtctatcgacgcagcgtttaagcgcggcgactatcgtacaggctgcgcacgtttcaacgaaaacgccgcaggccgcccgcaatgggtgtacgtcaaggacggcaagggcggttacaagacccttcccggccttatcacgcgggccgcagcgcgccgcgaactttgcatgaaaggggccggataatgtgggctatcatcgtagcgggcgcaaagcgtttcggcggctggattttggccgcattgtcgtttctggcgatgctggcaaccgtttggcttacgtcccgaaaagtcggtaagtccgaaggacaagccgaagcggcggaacagcgcgcagccgaccgcgaagctatcgcagtacgcgaagtgaacgaagcgcgcgaagcttccgaacgtcaaacaaaggcggtgcaaaatgcgaacgaagttgcttccgataatgctgttcttgacgacgacggcgtttctaagcggctgcgcgacgaatggtcgcgcgactaagccgccgcaatccatcgccgaaaccgtacaaacgaagcccgtagtaatcgacacggcttgcgattgggtgcgggcgatttgggtttcgaagtcggacgacataacgcccggcacggcgcgccaaatcctgaaccataatcaagccgtcgtaaagaattgcgggccgcagaaaccgcccaaggtcgattcgccttaacagaacgtcggccttgcggtatagtgaaggcaaatgcgaatgacaggccgacgccatgaccgaccaacgtaacgaatccgaagaaaaggccgcatatgcggccttgcttttgaaggaacgcgaccccttcaaggctgcgcttcaactgttccccgacaacacgaatcgcgccctatgggtggcgaatcattggccgattgacgccgaagtaaaggccgaacaagaacggctaatgggcgaagatgacggttcgtcgttccttccgtcgaaggccgaacttgcccgcgatatttggcaacgtatgcagggcacgacccttgcaaacggcgtgaccattccgccgaccccggaagaatacgcgaagcttgcgaagctttacgcggacgttcgcgggttcatcgaaaagccgcaaacgaatgtgaacgtaacgacgaacgtacagcgtgtcgtcgaagttcccgttttccaaagcgaaagcgaatgggaaaacgccgccgcacgtcaacagcgggaattgttagaaaatgcccgcactcgccattaaagcgcccgaagcgccgccgctgattctacagaaagcgccgccaatcgaagtcgtatttaagccgcttcccggttcgcagacgattgcgctttgttcgcacgctgcgcataccctgtacgaaggcgcacgcggccccggcaaaaccctaacgcagttaatgcgctattaccgtaacgtcggcaaaggttacggtaagttctggcgcggcgttatcttcgatcttgaattcgaccatttggccggacttgtcgccgaatctaaaaaatggttcggcgataatggcaagctgaaagatggggcgaagttcttagaatcgccgtcgcaatacaaatgggtttggccgactggcgaagaactg

SEQ ID NO: 9 - DNA, 64119 bp, unidentified
  source 1..64119: mol_type = genomic DNA
acggtcagaccccggcgacccccgcgttcaagcccatccgccacacgggcaccaccctcggcctgtccaaggagtccctgcagtccgaggagatccgcgacgaccgccagatcgccgacttccgccatggcgcacgccaggtgggtggcgacatcaacttcgagctctcgttcggcagcttcgacgacctgctggaggccgtcaccctgggtacctgggtggcagacggcgccccgggcggcgacggcgaccgcctgaaggccggcacggtccgccgctccttcaccgtcgagcgcttcttcggtgacatcgcgacggcggacaagccgtaccaccgcttcaccggcgtcgagctgaacaccctggcactggccatcagcgccaacgccatgattaccggcaccttcggcacggtcggctcggacatgtccaccgcccaggccatcatcgccggcgcgacctacgccgccccgacgaccacctcgccgctggactcgttcaccggcaccctgaacgaggccggcacgccgatcgccgtcatcaccgagatccagctgaacctggagaacggcctggaggcgcgcttcgtggtgggctccaagaagtcgatcctgccgtcgatcggccggtccaacgtctcgggcaccatcacggcgtacttcgagaactccctgctgctggacaagttcatcaacgagaccgagtcctcgatcgtcttcgagctcccggacggcgccggcaacaagtacgtcttcaccctgccccgcatcaagtacaacggcggccagccggacgtcgagggcgagggccccatcaccctgagcatgccgttccaggccctcctggacagcacgacccagtccaacatcatcatcgacaaggtgcccgcgtaagccatggaccagaacaataacaacgccgcgggggcggctggcatgaacgagttcttcacccgcggcaccgccaacgaggggatccaggtccccctgtggcgcccggacggcacgaagagcgaacactgggtccgcatccgcggcatcgactcggacgcgttccggcaggccgacgcagaggcccgccgggacgcgatccggatcgcccagctcgactcccaggccgagcgggcagcggagatcgccaaggcgaagcgccgcctcaccgcgcacctggtggtcgcctggtcgttcgaccagccgtgcaccgtggacaacgtggaggccttcttcgtcgaggcgccccagatcatggactccatcgacgtcgcggcgtccaagcgcaccctttttttcgcagccgggtcgaacagctcgcagccttcgccgagcacgagttcaagctcgacctgatccccaagggcagtaagcagaccctgcgtgcgtccctcatgcaggtctggaagacgctgaagcgcaagccgcctcagctggcggatgcgcccgagctccccgaggagctcgggtacatctgggaatggttccgtgaggtgttcgccggggtgcccctcaccttccaggagatgcaggcttggtcgcagatgaccggcaagcctctgctgggctgggaggcggacctcatcaagtccctcgaccgcattttctggaaggtgaacaaccgtggcaactgacgtcgccagtctggcaatcaagatcgagtcgctccaggtccagcaggccgaggggcggctcaagggcctgagctccgccggcggcggggccgagaaggccaccgcgggcctcatgggcgcgttcaccaagctgatcgggccgctcaccgcggccgtcagcgtaatgggcaccctgaacaagctgatggacgtccagcgccagtttgacgtcctgaacgccggcctcatcaccgccaccggctcctccgagaaggcggcaatcgccttcgacgccctgcgtgagttcgcccagaacacgccctacgacctgaaccaggccgtcgatggcttcaccaagctggtgaacctgggcctcgacccgagcgagaaggcgctcatgtcgtacggcaacaccgccagtgcgatgggcaaggacctcaaccagatgatcgaggcggtggccgatgccgccaccggtgagttcgagcgcctgaaggagttcggcatcaaggccaagcagaacggggaccaggtgtccctcacgttccgcggggtcacgacctccatcggcaacaacgcggccgagatcgagaagtacctgacggacctgggcgagaacgagttcgccggcgccatggagcgccgcatggactcgctcgacggcgccatggcgaacctgggcgacacctgggaccagctgtggctgaccatcagccagtccggcatcggtgacgccatcgaggcctccgtgcgcaccgcgaccgacgccctccaggagctgaccgacatgatcgcgtcgggccagatggaggcgctgctcaagtcgcagaccgtccagtgggaggtctggggcacggacatcgagaagtccatcgacattgtcacccagttcatcaaggacaacttcggccagtgggaggacgagggcgagtccgtcgtcgacttcctcatcagcgcgttcaaggagctgccgtccaacctgcgggcgatggtccagatcctgaccgtcgagttcgcctccggcatcgacaagatgatcgccggcgccgagttctggcgggacagcatcaaggccatcttcaccgacgacaccatcgccgcctcgatgaagcggttcatggcggagcaggagcgcatctcccaggtgcggctggactccatctcgtccatcctggacgagcgcgacgcgacgctcaagtccagcaacgagcagctggaggcagccaagcgcctgcgcgaggagtacgacaaggcgcaggaggccaagaagaaggctgcggccggcacggaccgcctggcgcagttccgcatcggcggggaccgggacaagcctgcctcgtccggcgtggacaaggccgctgccgccgaagccaagcgtcgggagcaggagtttgcccggctcaaggagtcgctccagaccgaggaggaggccatcaggtcctcctacgacaagcgcaagggcatcatcgaggccaacaccaaggcgggctccgatgagcgcgccaggctgatgggccgcctcgatgccgagcgcgatgccgagctgaagaagctgggcagctacggcaactcggagctggagcagctgcgccagtccctgctcaagcaggaggacgccatccgggagtcctacgaccggcgcatggagatgatccgcgcgaacacggccgaggggtccaaggcccgggcggagctggaggcccaggtcctccgggaccgcgacaaggccctggccgacgccgagcggcagcgccagtccgagcgggacagcctgtacaactccctgctgaccgaggaggaggcgctcaagcagtcctacgagcggaagaagcagctgatcctggagagcgagtcggtgacggagctggagcggcaggacctgctgcgccgcctccagaagcagttcaccgacgagcaggcccagatggagacgcagcgcatccagacccagctgcagggcgcggccacgctgttcgacggcctcgctgggctggccaagggttacgctggcgagcagtccaaggcctacaaggtactattcgccgtgagcaaggccttcagcgtcgcccaggccgccatgtccatctcgaccggcctcgccaaggcccaggagctgggcttcccggccaacctggctgagatggcccgagtcgccgccaccggcgcgtcgatcatctcccagatcaacggggcgcagttcgccggtgcgtacgaccagggcggccagatcccggccggcaaggtcggcatcgtcggcgagtacgggccggagctggtgaagggccccgcctcggtgcgcggcagggagctgaccggccggtcctacccggacggaggcaaccagcccgcgcagatggccccgcaggtgcacgtgaagaacgtgaacgtgctggacccgagcctggtaggcgactacctcggcacggacgagggggagaagctcatcatgaacgtcgtcaaccgcaacaagagctcgctgggctactaaccgaggagattcagatggccttcgcaacgggcacggccgccaaccacgtggacgcactggacaagctgcgcctgttcctgaccgccaacgagactctggctgctgccgggcagacctggcagcagctgcggtgggtacccgacaacctggactccgtggacacgaccgtgccgttcagctcgggcgtgtccctccaccgcatgttccggcccgacttccggacccagaactacaacgacgacgccaacggtcagtacctgtcgtcgacgtcgttcaccccggaccagtacgtgcgcctgaagatgcgcaccgcccgggccgtgacgcgcttcaccctcaaggcgagccagagctcccaggtccggaactacacgccgcgcaacttccggctggagtactcggacgacggcagcctgtggtccaccgccctggacgtcacggagcagcgcgcctggacggcgaacgaggagcgcaccttcgccgtgccggccgccacgggcgagcacctgtggtggcgcctggtcaccaagcagacgggcgactacggcggcaccctgaccggcagcaactgggagctccgctccctgtggctgtacgacggctcggagctggtgtcgtcctccgagtcctacctggtggtcaagggccccggcctggcgggcgacgaggagatcttcaccgccttccgcaccagctacaaccccggcacgggcgagtacttcatgatggtgcaggggctgaccggcttcctgccgaacgagcagtccccgcaccgccagcccggcctccacccgagcgggtggccgatcgtgcccctgtgggccgctgccatgcccttctggttcgtcggcagcggccgccgcgtggtgttcgtgttcaaggtgtccaccgtcttcgaggcgggctacgccgggttcttcctgccctacgcctcgcccgagcagtacccctacccgctggcaatcggcggctccatgtcgccccgctcggacagctaccggtacgactacgtgtcggcgtcgcacagcgccttcccgatgcctggctgctacaccggtgtctcgtccagcgaggtggcagcattcagtaccaccctgaacgtgatgctgccggacgggacctggttcgacctgcacaacaggccgagctccggcgggcagtcggagacgtacagccggtggcccaactcccctggctcagtgctgccccacggattcttcgacggctccaacacctcgggcagctcgggatacggcatccgggagaacatcgggggcggcttcaccgtgctgccctccaccctgttccagcgccagccgtccgccaggttcctgggtgagctggacggctgcttccagatctcggggttccagaacggctccgagaatacgggcaccattgacggggaggactacgtggtcttccagaacacctaccggaccgacgtacgcgagtactgggccctcaaggcggagtaacagacatggcatacgaaactggagccgccacgagcgtcgccgacctgctggacaagctccggctcttctgcatcgcagcaggctggaccgtaaaccggtgggacggcgtgggccagacggcgcgcctcaacctgcagaagaacgggctcttcgtgggcctgtgctcccaccagggcacgacggccctcaacgacaacctgaacggctacacccagagctcgagcaactcctactcctgcctggcgctcagcatggcggacgggtacgacggcgccgacacgggccgcggggccttccgccagcccggcgctccgacctacggcggctacacccggggctgcatgatctcggagatgaccgccgcggtcccggcctaccacttcttctcctacgcggactcggacgacgtcttcgtggtggtggagtaccgcaccggccgcttccagatgctgggcttcggcaacctcgccaagttcagctcggcggccctgggcggcgcgtggttcggcggcacgagcgccaccccgaactgggcgtactacgagcagagcgggtacggccccgactccaacaaccagaacgagctgatcccgttccgcatgggctaccagcgcggcagcgactccgccagcttcgtgcgctgcaacgtcgactccaacaacggctgggccgcctccaggcacgtggcggactcgagcacctacggcccgctcgccgccatcggccaggcgtactacgacgagtccctgcgccagtacaccccgagcgccctgggctggcagaccgccctgctccgccagaccgtgtacatcgggcgaggcaaccagttcgcctcgccctacggcgagatcgccaacatgcgccggctggagatgaccaactacgtgccgggcgacgagttcaccctcggctctgacacctggaaggtcttcccgtactaccagaagggcggcgcgaccggccagcgcgggtacgccatcctgaaggagacctgacatggcagtggtgcagatgaccggcgtcctgagggttgtaaccccgacgccggacgcggcctcgctggacacctcgagcaccctgggggcatggacctacccctggggctttcccattgtggagcccgagcactcccgcgcctccaggctggccctgccgccggccccggccgtggccgtgctcgcccctccgtctttcgaggccgaccgccgcgtcggcggcttcgtcgacgacctgtactaccgcgtgcacatccgtcccggcgtgatcgacctgggcaacctgctgtccagccagacgcgggccatcgaggtctggaacgcccacttcgacggccgcaccctggaggccatcacctccgagggcctggacggcgtcacgctgacccagccggaggcgccgccgaccacgttcggcgccctggagtcgcgcatctaccaggtcagcatctcgaccaacggcgcgccaaccatcgcgggccagtacgtcttcgacttcggggacgaggagcccaccctccggctcaccggccgacgcgtcgtgctctggcccttcatcccccagacgaagttcagggagtccctggagtggcagacggacctgctccaggcctactcgtccgagcagcgcctggcgctccgcacggcccccaggcagcgcttcctgtacgagttccagctcgacccgcaccagttctccagggccaaggccatcagcacgcagtgggcccaccgggtgtacggcgtgccggtctggggcgaggtcacccgcctcggcacggtggtggagggccaggaccgcctcgacttcgacgcgtccagcgcggactaccggaacaacgacatcgccctgctctggcaggacgacgagaccctgctcaccgtcgaggtactgaccgcggacgcctcgggcctggtgctgaaggtcccggtcgggcgctccttcgagaacgcctacgtgatgccgctccggtacgcccgcaccctgaacgggtccgagttcgcccgccgtcccgacgacatgacccaggcccgcgtggagttcctggtgacgaacaacgtggacctggccgcgtccgccgggctgcctcagtaccgggggcgcgacgtgctgatggaccgctccgtcatgctgtccgacctgtcggagaagatcatccgcccggtcgaccagttcgacaacgggtccggcccgatcacgaccgacccgcagagaggctacccggacagcacgcagaccatcggcctggacgcgctgtccagggcggaggcctggcgctaccggacctggctgcacgcccgcaggggcaagcagaagggcttctggctgccgagctggaaccgggacctcctggtgctgaccaacgtggactcggccgccactgccctgacggtgcgcccgatcggctaccccctctactacggggtcaccgacctcatgctcgtgctgaccgacggcacggtgctgtacaaccgcgtgctgtccggctcgaccgacacggacggcaacgaggttctgtcgctcgctgccggcttcggcaggggctttactacgtccgagattgacctgctctgcttcatgcgccacgtgcgcctggactccgacagcgtcgagatcacccactcatacgcgggccgctgcagcagcacgatccccgtcatcgaaacgcccgagggagactgatgagctacgcaaccatagaggcctccagggagcagggcgcgcccgtagagctgtacgagttcacccaggggctacagcgctgggccttcgcctcgggcgccttcgaggtggtgcgggacggcgtggtctacaagccgtccagcatctcccgcgaccgcgtcaagcagtcgacggacatcttcaagaacggcatcaaggtcaagttccctcgggacgacgagttcgccagccagttcctcgggttctccccggaggaggtgacctccctcaccatctaccgcggccactacggtgacccggatgctgagtttgtgatctactggaaggggcgcgtactcagcgcctccgccgccgactccgccatcgacctggagtgcgagccggtctacacctcgattcgccgccccgggctgcgagccaagttcgagtacggctgccgccacgtgctgtacggccggggctgcaacgtcaaccgggagagctaccgccacaacggcacggtcatcggcatgagccagggcctgaacgtcgtggtgtccggcgtcgagggcaactacgaagacgggtggttcgccggcggcatcctggttgcccccgatggcgcggcccgcttcatcgtgagccacaccggcggcacggtcgtgctgtccaggccgctggccagcctcgcgggcgaccaggccgtcaggctgtacccgggctgcaaccacctgaagacgacgtgcggcacgaagttcaacaacctgcccaacttcggcgggttcccgtggatccccacgcgcaacccgttcgacggaagctccatcgtctgagaggttactagcatgatttggtggtatatcgtagtcttcatcgtggccctcgtcgcgtcctacgcgatgatgcccaagccgcagaacgccaagccggcgggcctcggggacatcaccgccccgacggccgaggtcgggcgggccatcccggtgctgttcggcacccgggacctgaagggccccaacgtgtgctggtacggggacttccggaccgaggccatcaaggccaagggcggcaagaagtgacggacgaccgcgccgtggtgcggatggaacacatgcgccggctgggctactgctccgccggcgttcgctcattcttccagcgccacgggctggactacagcgccttcctccgggacggcatagacgcagacaagctggcggagaccggggacggcatggccctggccgtcgtagaggagtccaaaaatgggcggcggtaagaagcagaccatcgggtacaagtacttcctgggcatgcacatggtcctgtgccacgggccggtcgacaagctgaccgagatccgggtcgacgacaagctggcctggaagggcagctccaccggcgggcccatcatggtctgcgcaccgaacctgttcggcggcaaggagcgggagggcggcatcggcggcttcacccaggacatgctgaacaagatctacggggaccggatcgacccgccgctggacccgggcaactcgccgatggcggccagcgcgggtaccgtcgacgtcatgatgggcaaggacgaccaggtcgccaacccctacctggccggccagctcggcggcgccatcccggccttccgccgagtgatgggcgtcgtgcttcgtcgcgtctacctgggcaacaacccgtacctcaagctctgggccttcagggcgacgcgggtgcacacccggcagaacggcctggcccagtggtacgacgccaaggcggagatcggcgagggcgacatgaacccggcccacatcatccgggaggtgctgaccgacccggactggggcatgggctaccccgagggcgacatggacgaggccgcgttccgcctggcggccgaccagctgcactccgaggccatgggcatgtccctgctctgggacacccagcaggacctgagcgacttcctggcggtcgtgctccgccacatcgacggatccctgtacaccgaccggtcgaccggtcgcttcgtgctcaagctggcgcgcggcgggtacgacgagagcaccctgatggtgctggacgaggagaacgtgatccgcgtctccgacttcaagcgccgcacggtggacgagctgaccaaccaggtcagcgtggcgtactgggagaagtcgaccggcaaggacggctccatcacggtgcaggacattgcccttgccgccaaccagggcagcacggtcggcacgaccatccagtacccaggcttcaccaacggcacgatcgcgaccgtggccgcggcccgcgacctgaaggccctgtccaccccgctggccaccgccacgctgtacgcgacccgcgccgcagcagccctgaacatcggcgacgtgttccgcttctcctgggcggagtacggagtggagaacatcgttttccgggtgaccaacatcgagctgggcgagctgcagagcaaccagatcaagctctcagtcgtcgaggacgtgttctcgctcacctcggcgtcctacgcgccgccgccgccctccgagtggcagccgccgagcggcgaggccctgccgtcgccgtaccgcctggccatggacaccccgtactacctgctggtccgggagatcggcgacgcacaggcccagcagctgccgaagacggccggctacgccctggccgccggcgtctcccccggcgggacctcgatgaacatggcgatgtacaccagcgccggtgcgggctacgccgaccagacggacctgagcttctgcccgaccgcggtcatcagcgccgcctacgacgacagcccggagacgaccgtcatggccctgggcgccacgaccgactggatgctcgtcgaggccggcgacctggcggtcatcggctacggcccctcgaacgcccgggagatcgtccagatcgtggcgttcaccgacacgcaggtaacggtccggcgcgccgtgctggactccctgccgctcccggtcgcgtccggcgcccgcctgatcgtactgggccagggcggcgagcacaccggcatggactcgaccgagtacgccagcggcgagcaggtctccgtcaagctgctgacgaacgcggcccggggccagctggccctggagtccgccccggtcgacgtcacccccatcctggcccgccaggcgcggccctaccctccgggcctggtgcgcgtcgacggctccaggaagcccgcgaccgccgccggcccggtagccgtcacctgggcccaccgcgaccggacgcagcagaccggcgacgtcctgccgactcaggacgccgcgtcgatcggcccggagaccgggacgcggtacgggctgaggttcctggacgctggcggcgcggtgctggtcgctcgcgataacatcagcggcacctcggcgaccggcgacctggcgtacaccggcaacgtcacgatggagctgtactcgatcaccgacgcgggcgagagcatcaaccgccaccgccgcaccttcgcctacacggcggcggtcgggacgaccgagagcaccatcacggcgggcacctggacccccgacgaggtcatctttgacggaggcggagcctgatggcgaccatcgtagtaccccagcgatttgcccagcgccgtgacacgtcggcgaactggaacagcaaggacccggtcctctggaacggcgagatcggcttcctgctggatccgggccaggccgtcaagctgaaggtcggcgacggcgtcaagaagtggagcgagctcgacttcttcgcctcggacggcaagcctgtgcagctgcgggcggcggacgggtacatccagtggaactacgtgggcgacacgtcctggatcaacctggtctccctggacaacctgcgcggagcggacggcgacgacggggccgacggcaagagcgcctacgagatcgccatcgacgacggcttcgtcggcacgatcccggagtggctggcgtcgctgaagggcgacaagggcgaccccggcgacaagggcgaccccggcaaccccggcacgccctacgcccgacgcatccagcacgtggccgacaccgacgccgggaccttcgagtgcgactggggccagtacgacgagatccggatctccctgacggccacggtggtcctgagcttcacgggcgccatcgacggccagggctgcgtcctgaagctgcgccagccgccggcgggagggtgtcaggtcggactgccctcgggcgtcgtccggttcaactccctgatccaggcgtacgccgtgacccagaccgggtcgcgcgcggacaaggttggtttcgtctacgacggcgaagacgcacgatacgacctggtctccatcgttcccgggatatagcccatggacgactaccagccgccccaggcactgagcgtgccgttcctgttcgacggcacgtacgatccgccccaggccctgagcctgggcttcgtatttggcacggacggcggtgggggcacgacggacccgctcccgtcaaacttcatgatcctgctcaccatctaagggaatcaccatgaccgtccgagtgtacaccagcgccgatacgggcgcgcccgtcctgaccggctccaccgccggcgacctcatcaacctgctcaccaagtgcctggtggacggctacggctccaaggccggcgccggctggaccaagcccttcaccgccgccaaccgcgcggccttcaagaccggggcgggcagccgcggccgctacctgtacgtggacgacacccgcagcacctcgtcctacgcagcccgcgtgtacggcatggacgtcatgaccggcatcgacgccggcgaggggcgcttcccgagcaacgacgtctaccccggcggcatgtactggcacgtacactacacgggcagcacctcgatgggccgcccctgggtgatcgtggccagcgagaagatcatgtacctgtacctgcagaactacccggacgcaggctcgtccaatacccagtaccgggagttctactggttcggagactacgacgccttctcgccggcaaacacctacaacacgatcatccagggcaagaccagcagcccgaccacctccgagcaggatccgttcaactcgtcgaacgtgggcagcacctctgccggcctgtacgcaccgcggtcctacaacggcctgggcggcgcgatccagctcggccgtcgccacgactacggtctgtcgaacacctccacctggggtggcaacggcagcctgagctatccccacggccccgacggcgccctgatgatgtccccggtctggatccacgagccgggcagcacgaacatggcggccctgctcggcaagatgcccgggctgtgggctcctctgcagtacgtgctgaatacgggcgacaccttccagggtgcgggcgacctggcgggcaagtccttcatggcgttccgccagtacgagggccgcgccgtcctcgagacctctgacacctggagctaaccgtggccgacctgggcgccatcggcgcatcctacgggctgggcagcgacagggtgagggccgctccggccgtgctgctaggggcgggctacgccgggccggtagtacagccgaccgccgtccccatgcccaagccgctgctgggcaaggcgacgtcgacctacaggcgcgccccgtcgatgccgggcaccccgacctggtacggcggtgccaggcccgtcggcgccgagcccgtggcggtctaccgggtggcgggcaccgtcaagcagaggctgaacggcgtcgactcgccgctgatgggctgcttggtgcggctgtacgcccggcgcacgggcatgccagtgggcgctgccacgacggcggcagacgggtccttctcggtcgacggcctgctgcccgagagccagggcttcttcgccatcgccttcgaccccgacggcgccccggtgcagaacgccctgatcttcgacaggctgcaggccctgccttcggtgccgggcgagatcgtggaccagagcttcgccctgtccgtcggcctctcgattaccgccaccctgaaggccgtgtacctggtcggcgtcatcaccttcaccgtgaccgccggggcgctgcccgacggcctgaccctcagcccgtcgggcgtcttgtccggcacgcccacggccggcggcgagttcagcttcacagtcaccgccaccgggtcagtgtatgggtcagcatcccggacctggaccgtcgaggtgcaggagggcctggcctacttcaacaccctgcagggcgctggcacgctgtccctcgtgcgccagggccaggccgacgaggggttcatcgtgctgccggcgctgcccttcgggttcagcctgttcggcaccacctaccagaacaacatctacgcctgcgccaacagcttcatctccttcggcttcggcgtcagcgtgtactccggcatctcgccgaccaaccccggtcgcgcgctactgctgggcacggctgaccgctcctggaagaccctgtatgcgggcacgaagctcgatggcaactgcttcctggtacgcttcgagggctcgaccgtgtaccacgttgacgacagcaccaacatctgggaggtcggcttctacccggacggctccatctccgtggtcaccgggccgttcccgaatgacggcgtcaaggagatctcggatggcgccagctaccgatcgactgccaccccgacgttcgccgcaaaccgcgcctacctgggccagccgaccggaccgggcggcaacttcgtatggacggacaccacgccatgaccgaccgcaacgagaactggaagtccagctggagggtgcgccgccgcttcatgttcgtggtgtgcgccttctgcatgtgggtcatcgggtacgtgctgtacaggaacctggcgtccgggccggcggacaccgcgatcacgatggcgttcctgacgctcatcagcatcgtcgggtcctacgtgttcggcgccacctgggaggacgtatccctggctaaggccaagctgaagacgccggcagggactgccggcaagcccgccccggccccaggggcatcgcagagaatggaggacataccatgagcttcgtgttgggaaccaagtcccgcgccaacctgcgcggggtgcacccgcagctggtgaaggtggtggagcgggcgatccaggtcacctcggtcgacttccaggtcttcgaggggctgcgcaccagggagcgccaggcggtgctcgtcgcgcgcggtgccagccagaccatggactcgcggcacctgcccggccgggacggcctcggccacgcggtcgacctcgtgccgctgatcgacttcgacggggacggcaaggccgagctccggtgggactggtccctgtgctacaccgtcgccaaggctgtgcgcctggcgagcctggagctgaacgtgcccatcaggtggggaggcgtctgggaccgcgcgctggccgacctggccgaccccgaggacgaggtcgccgagtacgtgggccgccgcaaggcgcagggcaagaaggctttcctggacgggcctcacttcgagctgcccgccaacatctacccctaggagggtatcatgattccgctgggttacaagatcggcgctggcgcgcttatcggggttgctttggtcacggccatcgtgctatcataccgccattacgacggcctggtccaggacaaggccgagctcagcgcccaggtcgccaccctcgagcagggcaaggccgccgagaaggccagggcggatgccctggaactcgccatagacaagtgggatgacgccgccaagatccaggcggagtcgctcgaacgattctccactgtccagcgtgaggctggcgaaaccacgaggaagctgacggatgtcctgtcaaagcacgacctcggcgcgctcgccagggcgaagccgggtctcatacagtctcgcatcaatgctggcactgctgatgctttccgcctgctcgagcaatccacccagggtggatccgccggcggagcccaagcagcccccgctgcccgtcctgccaaagccccagcccgtacggactgagtccgtacagtggcgcgtggtccaggtcgacggcgagaccctcttcgccgtcacggcccggggatacgagtcgctctcccgaaacctggcggacacgatccgctgggccaaggaggcctcctggcagctggacttctaccgcgacagccgccagaccgacaagccccagggggaacagaagtgaccgcacagacgcccggcccggagcagcagctccacaatctcacccccgacgaggccagggcgctcatccgtgaggctgtgcgggagacgtttctcatgctcggcgtgaaggtggacgaccccatcgaggtgcagaaggacttccagcacctgcgtgactggcgtctcaccaccgacagcgtcaagacgaagacccttgtggccatggtgggtgtcgccgtaaccggcctggccggcgcgctgatgctgggcatcaaggagatcttcggtaagtgagtccccgcggcgggtacccggcttcctccttctccgggtatccccttccaccgcctccgggcggtggctttttctgagtctcagacagtcaggctgccttcgggcggcctgactcgttctaggccctggacctaggccgcctcggataccagggccggcctggaatgcccagaaggcacgccgtggcagcctcggacgagcaagaccgagccgacaaccaggctccagaacaccacgctcagcccgaccgccagggttatgccccgcgcggccctcagtccgtcgtcatttccctcatccagctcgcacatacgatgatgcctcccagggacagttcctgggaggcatcatgacgtgaccccggcgcggtcgacgccgtcagtagacccacacgcgctggtactgctcgggcatgtgctcgcagctccactcagactttcggccctcgtactcggccttggggtcctcgacctggacgcactccttcgagtgccacgagacgtgcacgatcggcaggtcgagggcctgcgcgaacgtcctgatgagcaggacgcccatgatgagtacggcgaggaggcagagcgcttgaacgagatagtggcggggcatgtgggtctctccttgaaccgtggccgttactggcggcttgccggtgcggggtgggtgggctggggcgtttcggcgggcggctcgccggcggtgatgcggatctcgccggacacgaggtcctgctcgatcccaatgaacttgccgccaatctgctcgagctcctcgcgggtcacagtcaggccgccaggcgtgcgagacgccacgacgccgagcagagcggtaacccgctgcagctgaatctcgtgcgggcagacgtcgcccgacaggaggcgggccagcaggtcgatcgtgtcgttacggttgctgctcatactgtttggtctcccaattgatctctacggatgaggtaccctttgcgcggcacttcgccacggcgggcagcttgaggtcgaggaccttcgccacggcgggcgcgtcctgcctcggaatgtagcccagcatctgcccacaggcatcatacacggccacggcgttgcggtcaaacttgttgtggggctcccgcctgagggtgaggacctcgtcggtcctcaggtcggcgatcgcctcgcgggctcccttgtggtgcacggagcccacgatgtatgttctcatctgtgacattagccctccttcttgggctgggcgcgcgggcggttcggcaccttctcgccgcgctcgcgcatgtggacggcataccagcggaggcatgccacggaggtcttggcgccgtcgaactgctcgcggatcttgtcgaggatggtctcgtaggagtgaccgtaggggcggccgtcctcgtccttgctgatgacctccagcagcaggccctcagccacgacgcggatcacggggcccttttccttcttctccttcggggccttctccttcttggccttggcgggcttggcgggcttggaggtcatctgcgccagcagcatgttcaggccgttgggctcctccttagccttctcgatcttctccgacagctcgggggtgggggtgccggcgagctcgacgatggcggcctcagtcttctccgcctccatggaggcgatctgctcgagcagcttggccttgccgcgcttcgcgaggctcttggggtcggcgttcttgccgctcagctcgttgtggcgggtggcgatgtctgcgatgttggattcgttggacaggttcatggtgatctccttggacgggtcggttggatcgaggacgcagtgcgtgccgtcgatgggttccattatggcgggttgtgggcacgatagtcccaacacttgggctaccgtgcttgaatgatggggttactgtgcggcttcgacagtcttgaggacctgacggaactgcgcgacggtcataccgttgatgatggtggcagtggggttcttctgacggacgagctcctcgctggcacccttgatggtgtacagtttggagtccttcatgatgcagaccttgcccttcgtgaggcggtcgtactccttcttcgcgaggatgtcagccgccatcgaacgcagctccgcaatgtcgagcagcttgtaggcgtcgatgcgggagaactcgaagtggggagacgcgtcgtcgtccatgtcgatgacggtgcagtaggccttgccgtcgacgtacaccttcgcggtgaagccctgacgccactccttcacgaggtattcgacggacttgagctccaccttgaccttgcgggcttccgtgggggccgtcaaggccttagcggcgggcgacttcttcatcttcgagcggtagtaggacacgcaggcggcggaggtgctgccttccgggaaggccttcttgacctcggcgagcaccgccgcgttatcgaggcccgccgagatgcccgcgcggatcacgtcagcaatggtcttaggcttcgcgatggcaaccgtggccgcaggcgcctcctgagtgggagggacgtagtccgcggtggtctcgatcacgcggtcgaagatctcctcgtggccctcgtgaccgtaggtgccgcgccacgtccgaccgttgtaggagacgtagccgaagtgggtgcggccgccttccttgtagagccacccgtcagccttcttgaggtccgacgcgccgaagtcgttggcgtcgatccatgcggtgaacagcttggatgcgtcggcgagggttgccgccaggtggcgctgaccgccaaacttaacctcgaacatatcgtgcctcacgtgtttgcgttggtgtgaggtcattatatggggtcttttcccaaatgggagccccctccagcaaattattttgctaaagttccgcgaaggccagtttgggcgccatacatataaaagagaagggcccccggacgtctccggaggcccctcaggtcccctatcacgagttgtcccccagcgtgactcagtgcacggtgggcttgctggcggtacggccgtccttgacgttcacgtcctcgccgtcacggcggaggcgggaggcgtaccactggacggtcttgacggaggtgttcgcctccgggtggcgtgccttgatgatgtccaccatcgccgggtaggtgagggcgcgcttgcggcggcccaggatgcggacctcttccttgatggtgcgggcggtgttcggcatgactgcttctccttcgttctagtgggcggtccgggtcgtcgcctggttgccgcatgccccagtagtggagcacggagtcagtatgcgctcacagtacgagccaaaacaccatcgttccagctaggtgagcgtgctgcgattgcccaatgaattagtcgcaaactccagcacctcctggggcgtgtggtccgggcggagcaccgacatggcggccagctcctcctcggtcaccccgtcggccaccgcttgggccttgaacccgggcaccaggtagcggaggacctccgtgcccttgcccacccgggcgtagatccagcagttgccgccgcagcgccacctcttcctgtgccacacgacctgggcctgcctgacctcgaagccgagcttgcccccgcgcttgggccggtcgcagcccttcagctcgagctcgaagtacaggccgttccagcacccgtccacgtccgggtcgcccgcgctcaccaggttctcgacccgccgcatgtgcaggccggccgtgcccttcagccggtcccgcagccactcccagagccttacctcccgggccacttcatgtcctcggtgaagacgcgcaccttgacgtccccgacggagatctgcaccggcgtgtcgccgttgttcggcaggaaggccgccagctcgccggcgtgcatgccgccgcccagctccgtgggcacgacggtgatgaaggccctggtgacgtagcccagcctcagggcggcgagggcgagggtcgggccgccgatgagccaggcgtccgggtggtcaagctgggcctgccccagggacttgcccagtccgaggttctcggcgtcgggctcccgggtgatgcgcaccatggagcggttcggcaggcggggcatctggtcgaaggtggtggacccggcaagcaggacgtcgttggcgttcgacatggtgagcaggcggaagatggccttgtccgtcttgccagtccagcgcatgtcgtcgtcggcaccgctggccaggtagccgtcgatggatgaagctagcagcagtcgcattggttgtactcctctaggtaggtgatgtggatcccggcgagggtgagcaccgcgatcgacgtggcccaggacttgccccaccgatggtggccgaggtcgggcctcggggccaccaggcggaggatgcccgcctccctcagcttgcaggcgcacgggaggcaggggaacgaggtcacgtagacggtgcagcccgccgtggggaacggtgcctgccggaggcagttgtcctcggcatggaccatgttggccagcttgaacgtgcggtcggccaggagcgacggcaggtcgggcacgtccggcgggaagccgttgtaccccggggagacctgccgccggtccggcgtcacgaggacggcgccgaccttacggtccgggtccttcgacatggctgccgccaggacggccatgcggtagaagaacccgtcccactgttcctgggatcgcttggtcggcgcctccatcactcgatgacctctggcttcgggttgtacgcgggccactggtgctgcttcgcctcctcggcgtagcggaccacgtagtcgtcggggtgctgctcgacctggctcagcgtccagcccggcagcgggagctgcggcaccaccggctcgtgctggagcatctccgccgccatctgccagtgcgactcgtacaggtgggcgtgggccagcgtcacgtgcatcacgcccggccggatgcgcagctcgtgggcgacggcgtccatcaggagcgcgtggcccatgacgtcgtacggcaggccgacgaacaggtcagagctgcggaggaacaggctggagtgcagctcgcccccggtgatgctgaaggtgaagctagccgggcagggcacgttcttctgccccggcgcacccagaccgtcctcagccggatcccaggcggacacgtagaccctccggtcgctcgggtccttgcgcagcgcctcgacagcgagccgcagctggtcccggccgaagtggttgcgccagcggtatccgtaggccgacctgacgccccggaagaagggctcaccgtcctgctcgcggcggacgtcgccattggaaagcgacacgtccttggtgcggtaggcgaggctctgcggcatgcgctcgtctggaccgtgggccagcaggtccatgtcgtaggggatctcctccacgaacttgtcccacagcggcgcgtacttggtgatgaaggtggcgtcctgctcgccccgcacgtaccaggccgcctcggctgcggcggaccgcgggaaggtcttgcggtagccgatcgtcggcaggaggccgtcgctcaggtcgacgcggaacgccgtgcctccccggccgacgtggacgcgcgttccggtgcgctcgttcgtctcgatcgggctgctgaaggcccaggcgatcagtgcaccgtagacgtcgtagaacggcatgaggacgccgctcacttcgcacccccgaggccctgctgcttcagccactcggcgtagtaggtgccgtagttcaccaggtcgcgggcggtgtcgtacaggccctcatagttgggctcgcggccctggcgcatcgccgtgatgagcgactggatgcgcaggttcttggtgtggagcatgtgtgcgtaggactcgtggccgaacgggaagtaggcctcgcgcccgcccgggacgttgttgtagtcctggcccttggtctcccgcaggtgctgcagctccagccacacggggctgatggcctcacggccctgtgcctgctggcgcagctcctggagctctgccacgtcggacaggtcgaaggtcagcagccagtcgtggttgggaggctgccacccctcgggcttgaccgcgtcgcggccgttccagccggggcgcttggacaggtcgccgcgcaccttcgccatgttggcggcctgcaccgcgtcgaacacggccagtggtggcacgcccatctcgacgaggcggcccagggcgaagtagatcaggtccaccagggcgtccgcggcctcgagcacgtcgccctcggcgtgggcgtccttgaactcctggatctcctcgttcagggcgtcgaccgacgcgtccatgcggatgctggacaggatggtcggggtgcccgggatgggcgtgtccaggatctggacgttgaactgctccgccttcaggagcatgcggctcaccagtgctgcaaccagggcctggtgcgggccggtcttgtcgatctcatccatcttgctgcttcctcagttgttgaaggtaccacgtgagcttgccgtccgtcgggtcgacgtcggtcctgccatctacgaaaatcgcccagctgtcggcggcgtacttgccgcagccaggcagggactcaatcttgacgcttcgggggtccacctcgagccaccgagctgcgagcctggtgagagtgacggcccggcggcgccacagccccaggggcttgaggacgtcgtgcaggtcgtcgggctctgcccgggacagcgcctccgggctcgggtagtccgccatcaggcggtcgagcgcgggccgcgcctgccgccaggtcgtcaggttgaccaggctgcaggcgaccagcatccagaacggcgtctccctcagccgctcctggaacagctcgccggcctcgggctcgtcgccctcccaggcctccaccctgaggaggcgaccgtggcggcgcaccctccagcgcacctcgttcatcgggccgccgcctccctgatgccacgccgggcggcgcagaccagggagtggatgaacagcccggaggggctgccgctcagggtgacctggcaggacgcgccgtcgcgggtgacgcggacgatgaggtggtcaccccggctgaaccgtacgggctccacctggaacccgtcccgctcgagggccgccacgccctccttgtgcgggcgcagctggacgcggatgcccatgctcaggcctccgccgtcttcttggcccgcggctgcttgggggcgaagcactggtggccctccggcaccaggaggcgcgcctgctggctgtcctcgctcagctcgtagcccagcccgttctccttgttgatggtgaacaggtgggagaggatggcggagcggtccaggtccagctgcgacatggcgtccgcgatcgggaagaagcccgagacgaagagcctggccaccgtggcgcgcttgccgggctcggggatcggccggagcgcgtcctggttgatcggcttgccgctcgtccgcttcttgggctcgtagaccgtgccgtcctcgttgaggcgctgcggcttctccggcttgggctccttgacaggctcgacgtaggcgaacaggtcgaagccctcgggcaccagcaggcgggcgcagtcgttgaccagctcgtagccgacgccgtggtcgcggttgagggtgaacaggtgggacagcacgccggagcgggacagcccgaggcgggccatcgcctcgtggagggactggggctcgtcgtgcaggaagaaggccgcgacctggccgcgcttgctctcggggcggcacgggcggagggagtcctcgacgatgggcttgccgccgcgcttggactcgtcggacttggacgggtcgggcggcgggggcaggaacttgggcaccgggaagcccatctcggtgagcaccatggcggccacgccgtagtccttctggaatcccagcttgacgcaggtctcccaggccttctcgatgtggtgcgccatcttggacggctcgacgtcgaagcgctccgccgtctggagctcaccgcactggttgctgacctggaaggcctccagggagtgggggcagaggatggtggaccgcttctcgcccttaatcacgatgacgtgggcgaagccgctcgtcggcgggtcggtgatctcgtaccggcgcttccaaaagttgggggcgccgccccgcacgaagtagaccttggcgaagacgatgttggctggcagcatggtggacgtccatatagagaaagggacctggtctgcaccaggtccctctatcttatggcaggagcttgaccccttaaaccatcatttccaggcgaactgcccggccgcttcggtgattactcgaagatgcccttgtcgccggcggactcgccgcgctgggcgtccgcttccttctgggccttggcttcggccttggccttctcggcggcgtccttcttggcctgcttctcggcgtccttggcggccttcttctcggccttggccttctcggcggcttccttcttggcctgcttctcggcttccttggcggccttcttctcggccttggcgtcgcccttcagctcgcgggcggtcggcaccttctcgccgtccgagcgcagcttgttgcggtaccagttgatgctggccatggaggtcttggcttccgggaactgctcgcggatggcagccagcacttcttcgttggtcttgccgtcgcggatcaggcccttggcgatctcgccgacgcccggagccttcggagcctgctccttggtggtctcggtcgcttcgccggtggtctgggtgctggtgtcttcgctcatctgcatctctccttcagagataggtgttgggattggactgtcgccgcccgttcgggcggcttgcccggcgtgcgtcagtgggtgtagtttaacgccgggctaattgtcgtggagccgtcgttcgcgtgccggccgggagtatcacagctgctgtctgaacagagccagcagtcggtctctgaggccgcgtccggctagctcctcggagatggagcgcttggactccaggttggcgaggatgtactcgtccaccgaggccggcgtgacgtagtccctgatggtgacggtcttgccgccgatctgggtggcgcgctcgttcgcctggtcccgctcgatgaggtcgaacgtgtgggagtaccagaggatgacgtccgccgccgacaggtccagacccgcgccgccggccttgggctggccgacgaagaccttcaccccggggtcgtggttgaaccggtcgatggcctcctggcgcttggcctgggagtgcacgttcccgtggtactcgacgcagcctatgccggccttctccagggtgcgcaccacccggcggatgtcctcccggaacttgcaccacacgatgcacttccggtccgactcgcgcacgtcctccagcatgccctgcagcctcgggttctcctcgtcggggaccaggtcgcgcacgttgccgtcggagtcgatgacccagccgctgatgagctgctggagcttgatgatccgggcgccgccctcgaccgcctccacctcgccgccgtcctcgagctccaggatcatctccttcaggagcctcttgtactgggcctgcatgtcctcggacaggacgacggtcctcgggtccatgagcaggtctggcatgtcgtcgacgtcctcccggagcacgacggaggcccacctggacatcctggcctgcaggtcgtcgaggttcctgtagtggtccaggcggtcgtaggacctgccgcccttggtcttctcctgcacgtagtaggcgtactggctctcgaactccccgaaggtggcgaaccccagggcgtggtcctcgagcagctcgaactggctgtaggcggccagcgggctgttggacaccgaggtgcccgtcagggtgcggcgcacccggcagtaccgcttgagggaccgcgcccgcttggtgcgcttcgagcccggcgaccggaagtcgtgggactcgtcgacgaccagcatgcacttgcccttgtgccgctgcaggaacttcttgatgatcgcggcgggcttatcgtggatgatggactcggagttgacggcgagcaccgacaggcccgactgggccctcaggacccggtccagggacgcagcgtggccgggcttgctcgcctcgctggcctgccaggcgtgggagacgtactcgatgccctcccacatgtggatcggcagctggcggcgcacccagttgacgtgcacgccgttcggggccagcaccaggacgcctgtgatgtcccccttctcgtgccggtagcaggccaggtcgagcacggacttggtcttgccggtgcgcatctgccacagcagggcccgggcgtcgtcgtcccggtagcggtcccactcgtcctgctggtgcttgtagttgggcagcctgaatcggggcgtcactctatcgtctccttgcgtggcttgaactcttcgcccaccagctcccaccggtccatcttccagtacagcgagtcgagcagcatggcgatcttccagccgcgggcccacctgagcgccggcgtggtccacacaacccgctcgtcgcaggtgatgaccgtcgaggccgacttgtacgggcccttctggtcaggcttccagtagatcttgtatctcacttgcggtacctcatgccagtccagccctctgccttcaccgggcacccgtcggcccacggcatcgtgtacgccatggtggcctcgaagtccttgacgtcgccctcatccatcccgcactcggcgatcagttcatcgtgcacggagaggatgacgctgtacaggccctcctggtggcacctgagcatggcgtccgccatcaggtcccgcgcggtcgcctgggtgatgttctcgacaagcatgccgccataggtgtcctggcgacgccacttcttggtgtacgggtccacgcccatgtaggtgagggcgggcttcttctcgccccagggcgtgggcttcatgacaacccgcgggtcgcagtagcccagcagcctgccggacggcagcttgcagtgcaggaagccgtcgaagcagcaccactgcaccttgccgcacttcacgacgcggccgggggtcctgacggcggcgatcgccgcggcctcctggtcccaccacatcttcttgacccgccagaacttggcccggtaggcgtcgacgatcttctgggcgaactccagctcgatgaagatgccgtacttctccgccagtgtgttccggaacttgttggcccccatctggtagcccaggcccaggacagcctgcttgcccatctggcgctcttcggcctgcgcctccttgtcgtggatcaagcggccgtagatctcggtcgccatcgccatgtagatgcactcgttccgccggaacacgtccagggcgtcatcatcgccagccagccagaggacgacacgcgcctcgatggcggcgtagtcggccaccatcaacctcttgccctcggatggcacgatcatcccgcgcagggcgtgggacagcagctccatggcgtccccgtagagcatctccatcatcgccaggtcgcgcgacttgatgacctcccaggcgagcgccatgttcttgatgttgccgcggggaaagttgtgcggctgcaggcccgcgccggaccaccggcccgtgcccgcaccgtggtagagcaggccgccgtggaccttccaggtctccgggtcagcccagttctgcgcagcaatgaacttggcagtgctagaccgcccgagcgccctgacgagctccagggcgcgcctgaccttcggctccaggtcctcccgcttgagccacgagtcgatcgtaccgccctgggtgttctcgatcggcagcccgttgtcgttgaaccacgcgatcatgcgggcgcgctgcgtcgccttctggaccaggccgtcggtgatctccaccagctcggcgttcagctcggtgtagatgccgtcgacgatctccagcgctgcctcgatgccctcccggtcgagctggaacccgcgctggttgatcgcctggtccatgaggtacatctgcgtctcgcggggagacaggtcgcgcaggcggtccgacacggcctcctcagccaggacgtccacgcggcagtaggcgcacaggcgctcgagcagctcggcgctctcgacccagaacaggggcaggcggaagacctcctcctcgacgtccggggtcggggagtgggcgacggccgtgtaggtcccgtcgtcgttcgcgaacaggtcgatcttgtacttcttggcgggcagcggcagggtgccctcgtcatcgatccaggcgaccacgtcccgcttgagcggcttgcgcggcttcgccatcttcttcatgatcttggcgccctcggtgtccttctccaccttcagggccagggcgggcgccaggagctccagcttgcgcggcagggagtacgccgccgccttggcagccgagcatcgccactgctcgtggccgactgcgggccaacccatgcgcgggacacagacgttggtccagatgccacgctcgaaccaggcattgtgggcctccaccaggcggccctccctgatccactcgaacagctcggcgagctcggggcagtcagcctcctccacgcccaggtgagggaaggctgggtgccacagggccgtgcggcccttctcccagtgcggcaggcggaacgccaggcacatgacctgggtcgtggggtcgagggagtaccgccaggagccgcagtccttgatggagcacgcggagcgggtttcgaagtcgatcgtcgccttgggggcgttcgtctcgtagtggatgcccgccgtctcgtacaccgaggcggaggcgatcttgaacagggccgtcttgacggccgcagctacctgggagcgctctggcaggtcagagacctgcactggctccttgttcggggcgattaccatggatcctccgggctagccgcatacattaccagggcggcgcatcaaagtcagccgccgtctcccaagccctgaagagctggttcgcacggaggcactcctccttggacagctcgcctatgtggaacgtcttggtgcccatgagatctgccatcatgcggtacacctggcctcggctcatggccggctcgctccagagcgggtcgatcatggcgtgcagggcccgccgcatctgccgggtctccctgtccgccatgaccccgagcgggaagatggagtgcgggtggcatcccacgaaggcgccacaggacatgcaggtgtagacataaggccagtcgccgcagggcctaccgtacaccacctcgttgttgaccagcacgacgagcggctccccgcaacagtcacaggcctccggcggatcacgccagtccttgtaccgccggcgccggtggtagtccgtgaacttcaccagtccacctcctcctggatgatggcgcgcacataggcgtcaaccacggggtccgcgtcggccgtggcgcccttggcgaccgccagggccgccttctccaggcggccgacgtcgattgcacctatgcgggcctcgcggaccagggcgttcttggtggcgtacagcggcttcagggccgtgagctgaatgcgtgacagctcggtccaccgccgaccgatcgaccggactacctgagacagcctgacggtcttctcccccggcacgatgcccgtgtcgtcgacggccttgccggcgaagtctgccacggccgccaggtccctgaggggccaggcggcgagcgcgcacagcgggcagggcagggagtgcttgtggtcctcgcacttcaagggcggacctcgtaggccggatccttgatgagctcgtgcgggtagtagaagacgcagctgcccgcgccgtcacgcaggacccacacccggccgtcgggcgcatggaactccaccaccccgcgagcgcccttgtggaagcccgcgtggggcgccacgatgatgcgctggccgaccccgaagtgctccggctcgtcagggtccatctgggtggggatcggctcgaccaggagcctgccgccggccttcacgacgcggaagggctggctctcggggatggtcagcagcttcgagccgaagccgccggtcaggatgtaccacagtacggtcttcagccagctcatgcgatgtgctccagtgcggcctgctgctcttccatcggccggtgtagggtgaagtcggcggccgcgcgggcccctgcgtggaatgccccgccgtcgagctccttcttcttgaacgcgtcctgctggacgacgccgtgcgcgtagatcctgtcgcagtgccgctggatggcgcggtcctcggcctccgtcggggcgatggcggagatctgcttgtacacggagttgagccagccgatgtggaaggcctgacgcttgccgccatcgcccttcatgtcgggccggcggacgaggatgtcgtcccacgaggcctgcatcgcccgccacaccaccttgtgggcgtactcggccagcatcacgcggcccttggggccgatgtagcggacgttcaggcgggcggcggagccggggttccgctcgaagacggccttgacgccgaaggcgcgctccatcatggtggccaggttgctcatggtgcggcagcggccgaagccctcacgcgtcttgacgaccacgtcggccgtgtccaggccgtccagctcgtcctcggtgatgcccagctcggacatgatcttctgcgcctgccgaagcgccgcggctgcctcgtgcggctcggggctcttcgagagggccatgcacttcttcagcttctcggtgagccgcttcctacgttctgcgtccatcttcattcctcctctttaatgaggcccagctctttggctgatgcccagattgagttgccgagctgcgggaccgcgatcccttgacctcggagcggtcgtcgccgtcgtacagcgcccagccgttgtcgtccttgaggaactggtagttagcctcctcaatgaggtccatcatgcgcttcgtggggctcacttgaaccccagcaattcagcaccccgctggagcagagacttcttgttggcgtccagcttggcacgggcccgctccagggcctcgcgctggccgggcttgaccgccagcaccttggccgcctcatcacgccagcgctggtcttcgttgcgctggtccaccaaggccaggttggcctgccagtctttgctcacggtctgtgctccgaaacagtatggggctatcatgccggggctttccgccctgggacgccatcgaacgggcaaaaagaaggggacccgaaggtcccctcctggggcttacctgcctcgacggcggtactgaccggggcggtcaggctggactcgtcagtccaggaagctgccaccgcccgaggactgctcgccctcgccgacgaagtcgtcgacggagtcgaagtcgttctcggcggcggtgcggccgctgaacgccgcgccatcacccagcttctgcacgttctgcaggccgaacgccacgcccttgttgccggccttgtcgtacccgtaggcagtcagggtggcacgggcgtagcagccgctgtagaagccgtcctcggacacttcgtccgagatgaggcggttcagctgctggtcgacgcagcccggctgcatcttggtggtggcggcgacgaacaccatgccctcgtagccttccagctccgacttctcggcgccgtcacggaaggggttgcgcaggccgtggtaccagcccttgccgtccggcttgagcttgtcgccgaacttctccttcgccgcagcatgggccagcttctgcatggcgtcgtactgggcggtcttgcgggcggccgcgtcgaacagcatggtcacgccgtacttggcctcgccggtgctgccctccatcgggggctgcggcttgaagatccaggcgaagctggcacggaacttcggggacgtgaccttgcggtcgttctgcttggctgctgccatttggtgcgctccttagtagcgatttgactggttagcgatgtaggtggagtccgccccgacgccgggtctgtttgccgccgtgacgcaacccgagagggaggcggtggacggcgacgtcggggcaggtggtcattattccggggtctgcgtctcgtcgacaccaccgagcggccggtcgagctcctcatcggtgaagcgccccgacacgatgctgaccaggccgatgccgtagtgccaggactgcgccgccgacaggttgtcgcgctgcagctcggccttgtccggctcgagacgcccggaggccacggcacggtcgagggtgcgccgccaggcagccagggtctccgcctcggtgcgcgtcacccacttgtgcgtcgcagccgccgggaggtcgtacagcggaccggtcatgcccggcaggtggtgctcgaaggtcttggcgccgatgtggacgatgaacggggtcacgccgtcgcggctgttccacaccttcagcacctcgggcgcctccggcttctcggcgttggtctggatgtaggtcatcagacggaacgcctcggcgtgctggaagttcggctgcgacgggtcgacgttctccgtcgcctgcttgatggtcttcaccagggcgcgcaggcggaccacctcgcgggccaggtccttcttgccctgggcggcgaggcccttgaccatgccggactcctcctggatgaagtcgagcatggccccgtggagcgcctcgcggtggaggatcttcaggtcctccttggtggggttgccggcgcgggcgcgctccaggcgctcctcgagggacgggccgctgagctgctggctctcctggatcagctcgcgggagcgctcgatctccctcaggtcggccttggtgagttcctgcatgggcttatgttcgtgcatggtattctcctggtaaaaagaaagggtggaagcacatcatgcttccaccccgatccaactagagccgttagtccgcgctctcctcgccgtcgtacgcgtcgaagtcgccctcggcagcggccgtggcatcgaccgcctccctgggatcgtcgagcgcggccacggtgatgccgccctccggcttgaacgacacgcccgcgacgagcgccttgatgtgcgccgccggggcgcgcacgccgtcggccttcagcttggccatcagctccggcgggcggaccgcctcgatcttgctcggggacttgggcttcgggtcctcgaacatcagctcgcgggggatgccctcggccgccaggacgtcgaaggccgacaccggctcgcccgtcacctcgtccaccaggtcctggcggaaggcgcggttcgacttcttgcggaccagcttgccgaagcaggcctgaccgccgggggtctcgcgcaggcgccggagcacctcggtcttcgccgacttgatgaagatgtccagcagcggtacagcccgcatgcggagcatcaggtcctcgtcggtgtcctcgggcccactttgcatcacggtatcctcggtgaagccgtccccgaactccaggccggcctggacgaacgcctgctcccgcagtgccgggcacacggccgaggccttgcagaaggtgcaccagtcacccgccttgagcggtgcgtccggatcctcggtggcgcgggcggcgatgcgcaggcgctcctcgtacgcccgcagggtggccttgtcggtggaccagcgccggaccttgccgtctgcgtggcgggcccggggctggacgatgaccaggtccagggtctcgaaggcccacctcagctcgtgggccttgccgagggcgtagtagagctcctgctcgttgtcctccacctcgacgacgacgccctggccgtgcttgtagtcgatgacggagacgtggtcgaagggcaggtacagggagacgtcgttggtcccgaacatcgggccccagcacacccggccgtcggcatggaacaggtgccccagggggaactcgtcagtggcggcgtagtggatgccgctcgggctgacgtaggacgggtccttctcccaggcctcgaagtcgaagtcgaagccgatcagccagttcaggctgaactggcgctcgacctccatctcggcgtggacgcccatgcgctccatctcgtcgcgcacggtgtccaggtagacctgcaccgcgtccgccatgtcggcgtcgatcgggaagtcctcgtggcccgcgggcggcagcccgtcggccgaggcgtgcaccgggacggagacgtcagaggccgccacctccagtacggaattggcgggccggtgtacggtggcttgctcggtcgggtcgaggcggacgtagccccccagccactcccaggcctggctgccgtcgagcaggcaggcctcgccgagcgcgtgcgcggcggtccccagccttgcggccggggaggagttgttgggtcgcccgtgctccatgcggatggagcccaggcagttcatccaccgcttcgcccccgacgcgtttcgtaccgcgtggacgctaggcattgatggcgtcctcccatcgtgccacgacgtccgcgacgctctctgccacggcaatgccctcctggtcgccggcggtcatgacgtgcgcgccgatcttgggattgaggacgcccatcggcgtggcgatctcgtccctctcattgtcgtcagtgtgcggcgggcagaccgacgacagcaggagggggttgataaatacgggctttccgccgtaggccatcgtgagctggatcatgcggccggccatgtcagttcaccgatgcgagctggatggtggggtactcgaaggtcacgccgcgcaggtcatcgatcgagaagatcgactcggagcgcacgccgcggccgtcggggtaagacaggaaggtcacgtcctcgccgtccttgaaggactgcacggccctgtcggcgtcctcgcggagcaccaggaaggcggtcggctgcggcaggcccttgaaccacaggaccagctgcgcggcgtccttcgggagcttctggttgggctgagcgctcatcagacgctcttcccgtcggccttgtcgatcagcttctgcagggcatccggcccctgctcggccaggtcgctgacggacttggcgttcaggctggtcagcaggtccatggcggcgtcgttgccctcgatggccgcgtacttcttcagggcggcgcgggcgtcgtcgatggtgaccttcttcttcttgtcgtccttcggcggagcagcctcgggctcagcggccggcggggtctcctgggccgtctcggcaacctgggtctcggccggcggggcctcggcagccttcttggcctcctgcacggcggccttgccggcagcttccttcgtggtcgtgccggccgtcgtgacggcattgttgatggcgccgatgacagcgacctgcacgggctcgccttccacgttcgcgatcatcaccccgttgtcgttcatgtccttcagcacgtcgaggatggcctcgagcagactgttctgcttcgcctggttggcgaggctctgctccatgaaactgttcacgtccattgcatgtgctccttgttgagcggttggtagggagtgacaatgtaccgtccggtgtccgggcgcggagccaccgtccacgggcgacggcgccctcggaccggatgcaatgcgttcgtcggtttcgcaatgcactacgtcatcgcactatgctcatcccggcctgtcgccggcccgaccaagatgcacccacggagtataggggaatgagtttgaatcagcagatgtccctccgcgtgtcggaggaccacagggaggtggtgagaagcaagctggaggagatgcgccgccaggcgcccgacccggacaaggtgagcgaggcggacgcggtccgcaagatcatcgaggaagcggcatccaggaaggtgcagcagtgagcgcactaaagcgaccgcgcacgggggacatgcgcgcgtacgtagagaacggcctgcagctcatcccgctgcaccggtacgacgcccaggacgccaagggccgccagcgcggcaagacgccgcgcgacggggcatggcaggcgaaggagtacgactcccgcgcggtcatcgagactgccgaccggaccggcatcaacgtgggcgtgcgtctgccgtcgaccgtcatggtcctggacgtcgacccccgcaacttccccgagggccgcgactccctggccgagctcgtcgccgacacccacctggacctgtcctcggcgccccacacgatcaccggcagcggcggtcaccactactggttcaccaagccggcggacgtcgacctgctcgactcccttgaggactaccagggcgtggagttcaagtcccggggccgccaggtcgtggccgcgggctcggtccacccgtgtggcacgcactacgagtgggacgacctggccccgtctctggacgagatgccggagatgcccgccaacctgatgcgcctctgccgccgacccacccgcgcgcacggcgaggccgcgggcctcggcgagctcacccccgagatgctggccaccaccctggagcagctcgacgccgaggacttctcggagcacgaccggtggcgcgacctgatgatggcctgtcaccacgccaccaacggcgagggccggcaggagttcatcgagtggtccacgcaggatcccgagtaccaggacgacgcctggatcatcggccgccggtgggactcgctgcacgccctctcgggccgcggcggtcgccccgtcaccatcaagttcctccacaaggtggtccaggaggtgggcggcgaggtcacccgcgtggacgcggtcgacgacttcgaggcctgggaggaccccgacgagctcggccagggcgtcgacgacgaggtgctgcgcgccgagcccaagctcgagggcctggcgggcgtgctcgaggagatgaacgagacccactgcgtcgtgatggagggcggcaagttccgcatcttcacggaggagctggaccccgtcctcaagcggccgttcttccagcgctccaccaaggaggacttcgagaacctctactgcaaccagctcgtggagatgcacgacaagctggtgaccaagtcatcgctgtggatcaggtcgccgcaccgccggcagtacaagggcatcatcttcgaccccgagcagacgcacgagggctggctgaacctgtggcgcggctgggccgtgcagcccaagaagggggactggtccctgctgcagcagctggtcctggagaccctgtgcgacggcgacaggacctcctacgagtacgtgatgaactggctcgcctacatggtccagcacccgtcgcaggccgccgaggtggcgctgtgcttcaagggcgagaagggcaccggcaagggcacgctcggccgcgcagcgtcattcctggcgggctcgcacgggctccagatctcctcgcccgagcacctggtaggccggttcaactcgcacctgcagaactgcatctgcctgttcgccgacgaggccttctgggctggcgacaagtcgggcgaggcgaagctgaagcagctggtcaccgagccgaccatcgcctacgagggcaagggccgcgacgccgtgacgggcaagaacatgatccacatcctcatggccgccaacggcgactgggtcgtgcccgcgggcctcgacggcgagcgccgcttcgcggtcttccaggtgagcaacaaccgccgcggggacaaggagttcttcagccgactcaacaggcagatgtaccgggacggcggcatccaggccatgctgtacgacctgctgatgcgggacatcgacggctgggctccccgggacgacgtgccggccacgtcggccctcgtggaccagaaggtgatgaccatggacgacgtcgagcggtggtggtacaacaagctcctcgacggcatcctcccgaacgcgcgcagcgactggcacgagggcgcggtcaccatcatcaaggagcacctccggtcggactacgcggagttcgccaaggaccagagggtgtaccgccccgccgaccccgtggccttcggcatgcgcctcaacaagctggtgggcggcaggctagagaacacgcaggtcaagccggcggacgacgactacgcggtcaaggtggaccgcatggggcgcgcctcggcctcgaagctgcccagcctggaggactgccgcgccatgatggaagccaagctgggcagcaagatcgcctggcccaaggatgccctcgactgatcgggggccccggctcggccacggccgagggccgtacgagccttctgagcccctggaaagccaggctcagacggtcgtacgagccgtctgaggcttacagatcaaggacttagctccggaatctgaggcagacggaccgtacgaggctttggctcgatgttgtaccaggaaaaacgacaccgagaccatgacggcagcatcaccaggatgcctagacggcttagaacctcagatagttgccgaaatctgtatcagaatcatagttttatcttatctagatctttttaataaaggtttagattgtataagcctttaaaacagatcttcctgctaaatccactaatctaggctttttgatggacacggccgacacggtccgccctgggcaacacgaccggcaaacctgcagggcaattccccgcgatcggaccgaccgtggccgagcccgggcggtggccgagacggcgggcccctcaaaagcctcacgcaaaaatcgtccaagcgcggtccccggagcctcgtgcacgaggaaccggcgggtcgggccccgggagaccgctggcttactgcccggcctgggcggcggtaccatcggaccattgcaccagcaaagcacacggagcacccagtgagcatcaagaacatgaccgaggacgagcgcctcttcctcagcgagcgcggcccggtctcggagctcgagctcgtcgagtgggagctcgagggcctcaacacccaggagcgcatgtcggcggagcggcgtcgcctcttcctgcgggcgttcgcgctccgcggcatcgtcctggacggctgccgcgcggcgggcgtgtcccgcggcgccgtggagcactggagggagacctccgagtggttcaacacgatgttcgagatcgcccgggaggaggccgccgaccgcatcgagggcgaggccttccgccgcgcggtcgacgggtacgacgagccggtcatctaccagggcatgacgacgaccgtcatcgacccggtcaccggcgaggagaagcagctggtcgtcaggaagtacagcgacgccctgatgcagaccctgctgaagggcgcccgccccgacaagtaccgcgagaaccacaaggtcgagcacaccggcgcggccggcggcgtcctggtcatcccggccgccatcgacaaggacacctgggcccaggaggtgcagcggcagcaggccaagtacgccgggaacaacgagggcggtgaccagcccccgcccgcgggataatcgcagagcagcacacgccgggcgcccaacagggcgccctttccacaccccgagagatcaccatggacatccagcccgcagaccacttccccgatcctatcgaccgcgcctcagccgagtccctggcgcacgacgaggcctccatagacgcggcccgacgggccacccaggcgcgccagaagcgatgggcaccccgggaggacggcgactgcgcctgcgggtgcggcaacgaggtcgacccgcgcaggctggccctgggctacggcctgaccatcgagtgcgccaccaggatggagcgccgatgaacgccacctgtgtccagcagctgggcaacatactggcggcccaagccagggtcctgggcatgcaggccgagaaccagcagcgcgccgtccagggggagtccatggcctacacctaccacgacttcagcgcggaggccgaccagatggaggcggcggcccgtgaggtcgcgacctgggggcacctgccatgagcgagatgccgaccaaggagcagatggacgccctcctggcggaccagctgcgcgaggtgcgggccgcctgggccaggcgccgcgaggccgagtcccagctgagccgcctcgccaagtaccggaccctgagcccgggcatgaaggacgaccagaagcgctggctcaagcagctcatgtccgcaaacgccgtcatcgaccgcatcctgggagcgtgaaccgtggccgaggtcaccaacatttccaagcgccgcatggagcgagacgtctactcccgcgaccccgacctctacctggaggcctggctcgacgacaggggcgagatcctggcgacccaggtcaggggcacctggcgggccccctccgagaccgggcgccaggcccacgacctggcggacaccctcctgggcatgtcctcccagggcgcgtccatcctgggcgaggagcactgggaggccgagccggtcttcgcggcccacgtcctgcgcgggggctacatgctgacccgcgccaggcgcttctggagggccgaggccagggagcccctgggtaagcgcctcaagtgcgcctggtgggtcgcacggaacgcctggggagccctggggaccgtcctggcggcctgctactgcctggtcctgcaccccgaccgggccttcccggccgacgaggaggactgatggcataccagccgccccactggcgccgcaagaagaccccgcagcaggtcgcccaggagggcccccggaccaaggcctggatcccccaggccggcagccaggtcctcttcctgacctgcccggtcttcgagtgcctgtttgagggcacccgcggcccgggcaagaccgacgccctcctggcggacttctgccagcacgtgggccagggctacggcgccgcctggcgcggcgtcctgttccgcgccacgtacaagcagctctccgacgtggtggccaagagcaaggcctggttcaagctctggttccccggcgccaagttcaacgagagcgactacgtgtggaccttcccggacggcgagcagctcctgctgcgccacatggcgaaggtcgacgactacgacaactaccacggccacgcgtacccgtggatcggctgggaggagctcaccaactgggccacctccgagatgtacctcaagatgttctcctgctgccgctcgacggtgccgggcatgccccgcaaggtgcgcgccacgaccaacccgtacggcaaggggcacaactgggtcaagctgcggttcaggctgcccggcatgcggggcaagatcatcaccaccccgggcgaacccgaccgcatcgccatccacggccacatcagcgagaaccgcatcctgctggacgcggaccccgagtacatcaaccgcatccgggcggcggcctcgaaccccggccagatcgcggcctggctcgacggcagctgggacatcacctccggcggcatgttcgacgacctgtggcggacgcagacccacgtcgtgcggcccttccaggtcccgcgcacctggacggtggaccggtccttcgactggggcagcagcaagcccttctcggtcggctggtgggcggagtccgacggcacggacctggtgttccccgacgggcgcaggatgcgcacggtcaggggcgacctgttccgcatcggcgagtggtacggcctcaagaagggcacggagaacgagggcctcaagatgctggccgctgacatcgccgagggcatccgcctgagggaggtgggcatgggcctcgccggccgggtcaagcccggccccgcggaccccgccatctggtccgaggagaacggcaactgcatcgagcgcgacatgcgggccaagggcatcaggtgggagcgggcggacaacgcgcgcaagcagggctgggagcagttccggaagaggctgaagaactccctcaacctggacgagatggacgagcccaggcccaccgtgcgcgaggcgcccggcgtgttcgtggtgggcgagcgctgccccgacttcgtgcgcaccgtgccgcccatgccccgcgacgagaaggacccggacgacgtcgacaccgacgtcgaggaccacgccggcgacgactcccgctaccgcatcatgcacaagcgcaaggccgtccgacagggcagcttctgaacgatggtgtgcgggccatggatggcccggcatcattaccccatcctccgacacgctgaccgacgagacagtgctaggctaggaacgcccgcatagcggctcccacgatctagcggtccaggggcgccgcgactcccggctacctacgcagtaggatcaacctcccgtcaccgatgcccgccaggcacaacctggcgggcatcaaccaccaggctccatggtggagcactctgcaccaaccggctgggtcgcgaaccaagtaagtagccactatcgggctacatgtcggaagcggatagaggtagcctcgtccagcagggtattccaccatggagcttgagtcttcaccggcgagctcccttatgatgttcacaggagtgcacgcctgagcaggtccgccgacgacgacccactccccgggtaacggtcgcagagcctgcaggagccctagggagctccccggtgcagactagcagggcaggatcggcgggaccaccctaccatgggagagtggagcaaactgtcgtccagcctagcgggctataagcgcctccgacccctgccagcaccctcgaagcccccgccgatcgggggcttcgccttttgtggagttcgatggcgttcggccacggctgggcccggtaaactgagctccctaccaaggagtccgaccatgaagagcttcgacccgtctgccatcgtgccctacgccatcgtgccgctctccaaccaggaggccatcgagctgtgcgaccagcgcgacgcgggccgcgcccggcacaacatgccgcccatgaccaccacccaagccatcgagttccagaagcacgtcgcccgcgagcgcgccgacgaggcctggctgctgagcaacaccccgatgggcaccgtgttcgacgtgctgggcgtgtcccacatggtggtcagccacccgcaccgcgtcgacacgccggagcgcccgggtcccggcccctggcaggtgcaggtctttgcgcccgacggccggggcggcatcgaccgctccctgctgacctgccggcagctgcgcgccatgctcgagcccggattcacggccccatgaccgcgtactcctccgtccgcaagggcgtccgggcctggctcgaggccaacccgggcgagcactccatctcccacatcgcctcgcaggcgggcctcgaccgtgacgcggtcacggacgtcctgggcaagatgcgcagggcgggggaggcgtcctgcaggcccatgggacaccggaagctgtacaggctcatagagggctccgtggacacgtccaggaaggtgggcggccgggaccgcgaggccaagcgggagtacgaccggctgtacttccagcgcaagagcctggagctgcgccggcagaggctctccaggctggcggacgaggcggcccctccgcccgagcagcccagggaggagcgcgccgagaccggggccgagttcaggcgccgcggcggggagatcgagatgctctcagcccactgggactgaacgacggcccgcggccgatgcctcccgcggcatcatgcgcctaccgggtctggacagcccggtcatggcgttccatcggttggaagggctgagagccccgatcccacaagggtcggggctttctttttcgccggctcgcgctacgagcgtgcgcgcgtcacgatgcgcgctcggcccgacgcccgggccaaggcccaaccaccggagtacctccatgatcgaccctaagacggggattgtcctcgaccccgcgcgcgacgccctgctcaccgagttcggcaccgccaccctgtccaagcagtactgcctccccggcgagaccttccagcaggccttcgcccgcgcggccaaggccttcagcggcggcgacgacgccctggcccagcgcctgtacgactacgccagcaagcagtggttcatgttcgccaccccgctgctctccaacggcggcaccaaccgcggcctgcccatcagctgcttcctgaacgacgtcgacgactccatcgagggcctggtcgccaacttcggcgagaacgccctgctctccaccaacggcggcggcatcggcaccaactggagccgcgtccgctcgatcggcgaggtgaccgccaagggcgtggacacccccggggccatggccttcatgcacgtccaggactcgcaggccatcgcctaccaccaggggcgcaccaggcgcggcgcccacgccgtctacctggacgtctcccaccccgagatcgtcgagttcatcaacatgcgctcgcccaccggcggcgacgtgcaccgcaagaacgagaacctccaccacggcgtgaacgtcaccgacgccttcatgcgggcggtggaggacaacggcccctggcagctggtcgacccgcactccggccgggtgaccgacacgatccaggcccgcagcctgtggatccagatgctccagcagcgcgcccgcctcggcgagccctacctgttcttcatcgacgcggccaaccgcgacctgcacccggccctgcgggccaagggcctccgggtcaaccactcgaacctgtgcaccgagatcaccctgccgaccacgccggaccgcacggccgtctgctgcctgtcctcgaccaacatcgccaagcgcgacgagtggtgggacgtccgggagcagttcatcggcgacctggtcaccatgctggacaatgccctggaggtcttcctggagaaggcgccccacggcatgtggcgcgcggcggcctcagtgctgggcgagcgctccatcggcctcggcaccctgggcttccacacctactgccaggaccagggctggacgctggactcccacgaggccgcgaccttcaacgtcgtcctgtactccgagctgaaggcccacgccgtggccgcctccatgcgcctggcccaggagcgcggcgagcccgacgacctggcgggcacggggatgcgcaacgcccacctcctggcgatcgcgccgaacgccaccagctccatcatctgcggcggcgtcagcccgagcaccgagccgatggtcgccaacgccttctcccagaagacgatggctggcacggggatcatgaagaaccctgcgctgcagcgccgcctcgccgcgctcggccacgacaccgacgacgtctggcgcagcatcttcctcgagcgcggatcggtgcagcacctgccgttcctgtcggcctcggacaaggctctgttcgtgaccgcctcggagctcgacccgggcgtcctggtcgagctggccgcgcagcgtcagcccttcatatgccaggcccagagcctcaacatcttcctgccggcggacgtcgacacgaggaccatgcaccaggtccacatgcgcgcctggaagctgggcctgaagtccctctactacctgcgctccagctccgtcaaggccacctcggtcggcgtgatgccggagatcctgcgcgagcccgccccggcgccccaggcagaagagacggttgacctgccccaggtgagcggcgcagcatgcaacctcaacggtgagtgcaccgcgtgtgaaggctgaggaacaacccatcatgatcgacaacagtccgtccctcttctcgaagagggcagagtacaagcccttctggtacccctgggcgtacgaggccttcgtggcctcggagcagatgcactggctggtgcgcgaggtgcccatgacgcaggacgtcaagacctggcgcgccgacctgaccgaccgggagcgccacctgctgacccacatcttccgcttcttcacccaggcggacgtggacgtggcctccggctacatcgaccggtacctgccgacgttcaagcccaccgagatccgcatggcgatggcctcgatcgccgcccgcgagggcgtgcacatccaggcctactccaccctgatcgacgaactgggcatccctgaggtggagtactccgccttcatgggctacaaggagatgctggacaagcacgagtacctgttccagcgccgcgagggcctggagggcctggcgctggacatcgcggtcttctcggccttcggggaggggctgcagctcttctccagcttcatcatgctgctcaacttcacccggttcggcaagatgacgggcatgggccaggtggtaagctggtccatccgggacgagaccctgcacgtcgagttcatgatgaaggtgtaccaccagctgctggccgagcatccccacctccgcacggccgagcactccgagcgcatccgggagatcgcccagaagatggtggagctggagttcgccttcatcgacctggcctacgagtccggcgagaaccagggcctctccgccgaggacgtcaagcagtacatccgctacaccgcggaccagcgtctcgcccagctcggtgagcgcgccctgttcggcgtcagcaagaaccccctgggctgggtcgatgctatcgtcttcgggaaggagcacaccaacttcttcgagaaccgggcgacggactactccaagggtgccgtgacgggcagctgggacgacgccttcggctgacccagcgcccaaactaggaacagcggcatctccagaggaggggcggcggtacactgtgaccgtcgcccctcttttactatccgggcctggcggcacccggtcaggagataccagtgaaccacatgcagcagaccaccgggtccgaggcccggcgcgacaggccctacgagatgggccacgcccgcataccgaccttcgccaagcgcttcgacgacgtgccccaggcgatgcacgcggccctcgagaaggcccagctgaacgtcgtgccgaacgccttccgggtgaacgtcgggcgcgacctgttcgacctctacctggagcagttcgacccgcaggaccgccagtaccacgactgcaactgctgccgctcgttcgtgcaccgctacggcagcctggtcaccctgacctccgacggccggaccaagtcggtcctgtgggacgagaccctgctgggctcccgccacccctaccgcagggtcgtcaaggccctgcgcgaggcggtcgagcgcggccacgtggtggaccagttcttctgggagggccggtccgactggggcgcccgcgagcagggcggctggtcccacctgtggaccaaccccggcgtgcactcccacacctccggctccaaggacgcctcccaggtggcggccgagcagcgcgagaaccgtaagcacctgcacttcgccctccgggagttcaccctgggcgacctggagcgcgcccgggacatgctgatgacgggcggcctcaaccaggccgacaagactgtcaagatggcggagttcctgatcgaggcgaagaaggccatggcccacctctcgggcgaggcggtcaaccgccgcctgtggttccgcgtcgccatggcaggcaaggggtggtgcaccccgcgctcctcgctgctgggcgccctgatcgacgacatccgctccggcgcctccgtcgagtccatccgccggagccataacaagcgggccgacccgctgacctaccagcgcgcccaggcggcaccgaccgccggcaacgtggcgcaggccgagcgcctgttcgagcgcatggggctcgcccggtcgctcgagcggcgtcccgcgcgggccgacgaggtcgtgttcgagtggcagccgcagccgcccaggaagaaccaggcgggcggcgtgttcggccacctgctgcagcacgagcggctgtccaccgagcgggcgctcctcaacgcccgcgccgagcgggtgacctacgcgaggttcgcccgggacgtcctgccgcgcgccctggagatcgaggtcgtggtgccccaccagggcaacttctgcgcgatcacgaccgccgtccaccccgacgcgccgccgatcctgcagtgggactccatggagtgccgcaacccgttcgcctggtacgtgtaccaccagggctcgccggcgtccaactggggcatccgctccggccgcgccaaggtggtcgggatcacgaagcagccctcccagtggggcggcgggttctcccaccacggcaactcggtgatcttcatgatcgagggcgcggccgaccagcgccaggcctcgctcgcgctgttccccgagtgcctgcgctcggagctgcacgaggtgcgcgccaccctggaggcccactcccgctcggcccgcctggagcgcctgccgcggggcgtccagcacgcctccggcctgaggctggacgacaagaccccgctggaggtgctggtccgcaccgagggcggcgtggcgaggtacgccctggaccgcatggactgatggtacgcggttgactggggaggggccatgataggctcctcccctctctattacccaaggagaacaccgatggacttctcaccacccaacttctggctcaccctgctctgcgtgatgggcgccgtctcgctcgcctggctggcgcggtcgatccggcggcctggcaacatgtaccgcgctggcatcgagtacgcgctggcggagctgcacctggcggaggacgccgaggaggcggccgacaggctgtgggagcagagcgcctccgccttcgaggagcccgagggcgcgctcgagttcgaccgcggcatccgcgagggcatccgcctgtactgcaaggccgacgagaccggcatccgcgagctggaggagctgcgctccgagctgacccgcatggtagccgacggcgatgccagcggggctgaggtcaatgtggccctcgacgtgatcgaccggcgcctcggcgtcggaatgtacctgacccaagcgggcgaggaagccctggagcaagcccgtgaacagtaagcccctctacatcttcgacctggacggcaccctggcgaccatcgaccaccgccggcacctcgtcgagtccgaccccaagcagtggcgggagttctacgccgcctgcgacggcgacaccccgtgccaggcggtcatcaggaccgccaacgcactccacctggcgggcgccgacgtgtgggtgtggtcgggccgctccgacgaggtggcggacaagacctccgcctggctgctgaagcacctgccgtggctgcgggagcacgacccgttcatgggcatggccctgcggatgcggttcgcccacgatcaccagccggacgtgaagctcaagcgcctgtggctctcccagctgcacccggacgaccgcgccaggctcgtggccgtgttcgacgaccggaagtcggtggtggacatgtggcgggcggagggcgtgccctgcttccaggtcgcgccgggggacttctgatgagcttccgacccatgctggcggcgtccatcgacgacgtcctcaagctgcgcttcccgctgcagacctccccgaagctggacggcatccgctgcatcgtgcgggactccgtcgcggtgagccgcagcctgaagcccatccccaaccgctacgtgcagtccgtgctcggccacccgatgtacaacggcctggacggggagctgatcgtcggcgacgcggcggacaagatggccttcaacaacacgacccgcggggtcatgtcgatcgccggggagcccgacttccgcttccacgtcttcgacgacgtgacccacccggagatgggcttcaacaagcggcacgacgaggccagccggcgcgtgacggcgctcggccggccctgcgtcatcgtgccccactgggaggtcaacaccccggaggagctggtgacggtcgagacgtccgtgctgggcgaggggtacgagggcctcatggcccgcgacgcctgctcgccctacaagttcggccgcggcaccctgcgggcccaggacctgctgaagctgaagcgcttcgaggacggcgaggccgagctgctccgcatggaggagctcatgcacaacgccaacgaggccagcaccagcgccctcggcctgacggagcgcggccacggcaaggacaacctgctgggcatggacaccatgggcgccctcgtcgtgcgggccgtcaacgggccgttcaagggcgtcgagttctccatcggcacgggcttcaccgctgaccagcgccaggacctgtggaaccgccggcacgacgggctctccggccgcctggtgaagtacaagttcttcccgggcggcagcaaggacgcgccgcgcttccccgtgttcctgggcttcaggagctcggccgacatgtgacgggcggaggctgctggctcacaaccagcagcctcccgggctaccatcgcgagcatcagctcacaactagcccaaggagcccgcgatggccgacggacccaagaagaagcccacggtcgccacgccgtccggggcctacctgcgcatgcagccgctgtggaagatgatcgacgccctcctgggcggcacgaccaccatgcgcgctgccgggaaggagtaccttccccagtacgacaacgagaccaacgccaactacgagtcccgcctcgagcgggcggtcctgctcaacatgaccgagcagaccctggacaccctggcgggcaagccgttccgggagcagatcgtcctgggcgaggacgtcgacgccgacttcgaggagctgtccgaggacatcgacatgcagggcaccaacctgcagtcgttctgccgggcctggttccgcgagggctgggccaagggcttctcccacgtactggtggaccaccccacccccgaggagaaggtagacgcggcgggcgtggcgatcgcccggacgctggccgatgacagggccgacggcatgcgcccgtactgggtgcacatcaagcccgagtgcctcatcgccgcctacgccatgatggtcaacggcaaggaggtgctgacccacgtccgcatcaaggagaccaccatcgagcgggtcggctgggaggaggtcgagatcgagcgggtccgagtcctggagcccggcatctggcaggtgtggaagctggtcgacgagaagaaggacgagtgggccatcgagagcgagggcaccacgaccctcgactacatcccgctggtcacgttctacgcgggcaagcgcgtcggcctgatggacgccaagcccccgctgatcgacctggcgcacctgaacgtcgagcactggcagtccaagagcgaccagcgcaacgtcctcaccgtgtcccgcttccccatcctggcggccgcgggcgtgccccccgagcagaaggtcacgattggccccaacaacttcctcaccaccgaggacgtgcagggcaagtggtactacgtcgagcacacgggcgcggccatcgcggcgggccagaccgacctggaggccctggaggaccagatggccacctacggggcagagtacatgcgcaagcagccgggcgacgagacggcgaccgggcgcgccctggactcggccgagagctcgtcctacctggcgtccaccgtgcacgacttccaggactgcgtcgagctggccatgaagtacacggccaactggcgcggcaaggacgacggcggctcggtgcaggtcgactccgacgtggacctgggcgaggcggacgccgccgagctggacaccctgaacaaggcccgcgcgcagcgggacatctcccgcaagacctacctgggcgagctccagaagcgcggcatcctggcggacgacttcgacgaggagcaggacgccgagttcctcgaggaggaggccaagaacacgatgggcgacatgttcggcggcggcaacggcacgggcctccccggccagcagccgccgggcaaccggcagcccaacccccaggacccggcccaggtcgacccgcccaccccggatgacgagtgatgcccaagaccgctaacgaggagatcctcgacgcgaccgtacgccaccagatcaagctgctgcgcttctcccagggggaggcgcagaagtccgccgagctgctggcccagagcgacgccgagctggtcgccctgctccagtcgggcctcaccgacacctcggaggcccgcatcaggggcctactggcggaggtgcgccggatgcgcgccgcggtcgccgagcgcatccaggtggagctcgaggaggacatggagggcctctccaagaccgaggccgagtgggaggtctcgatgctccagggggcgacgccgatcgccctctccttcaatgcagtgcccgccacggtcgtcaaggccgtcgcgggctctcccatcaatggcatcccgctccaggggtggctcgggaagatggtgaccaacgacgtcgcccgcatcgagcagcaaatccggctgggcgtcctgcagggtgagaccgtcgaccagatggtgcgccgcatcaggggcaccaaggccgggggctacaaggacggcgtcctggagaccacccgccgggaggcggagatgatcgcccgcacggcgaccaaccacgtgtccacggccgcgcgccaggctacctgggatgccaacgccgacgtcatcaagggcgtccggtgggtcgccaccctggacggccgcacctcccccgtctgccagagccgggacggcgaggtctacccgatcgacaagggcccgcgtccgccggcgcacccgaactgccgctccacggttgcccccgtgctgcacggggaggagatcgtgggcgatcggcccaccgtgaccgacacccgcacccgccgccagcgtgagatcgacttccgggccgaggccaaggaggccgccggcgacaagtggaaggacatgtccgcagcccagcggaacgccgccatcaaggcgcgccgcgacaagtgggcggacgagaacatcgggcagacccccaccacgaccaactaccagtcgtggctgaagggccagtccaaggagttccaggacgaggtactgggcaagggcaaggcgcagctcttccgagacggcctgccgctggagaagttcgtcgacgagaagggcaagccctactccctggcggagctgaaggccgagctggagggcgacaagctgaacgtcatccagcctggcgtcggcctgaaggccaagtcgctcctgcagcagggcatgtcgccctcccaggtgctggaccagatcaagcaggagttcccggacgcgtccacctcggctgcgtcgatcgcctcctacaagtccgagctgaacaaggcgggagcgctcgacctgggacccgcctcgaaggtcccggccggcgccctcaagcaggccaaggcggtggccgacgtcgtcgccgacctggacgcgtccctcccgccgaacctgaagcacgccgtcggcggccagtggtccaccgtcgtcgacgacctggacgggtcgcccggcgcgtacgggtactaccaggcgggcaagggcgtggtcctgagcgggaagaagctgtccgtcctgccggccgcccaggccaagcaggtcgccgcccacgagctcggtcacctgctacacaagcagcacgacctgctgctcgacccggacgttctggcggccctgaaggcctcggcgaagggcctgtccccggacgcccggaagctctactcgtactacctgacgagcgccgacgagctcgtggctgaggtctacggccaggccctgagcccgagcgccgtgacgtcccagggcctctccgccatcgagttcaacaaggccttcggccccgcaatccaggcggccaaggacgcgatggcgaagaagttccccgtgcctccggccggcgccaaggtcccgctcccgggaggccccgccctgccgtacgaggtcgcgggcaagcacacctcggtcgggtcgctggccaaggcgctgctgcagcagggcatgcctgacgaccaggtcctgaaggccgtcctcgccgagttcccggaggcgcagaccaagcaggcgtccatcgcatcgtacaagtcccagctgaagaaggacggcctgctgcccaacaaggcctccggccccgtcgtggctgccaagcccatcccggacgtcgtgcccgtgccctcgtccggcgccgcggctgtcgtggcgcccgaggcggccgccacccagtcggccctgaccctcacctcggcgcagctgaaggacgaggccatcaagctgatgcagaagggcatgctatccaaccaggacctggcggagaccctggcgaagcagttccccgccaacgcggcggacgtcaaggtcaccaacatcgcgacctggaagtccaactggaagaagtccagccccaactcctacaaccacgcggtctcgctctccgagaaggcgacggtcaaggaggcggtgtcgggcccggtgcagaagcccaagctggcagaccagaagctcggcggcacgtccaccctcgccctggacaaggtgaagtcggtcctggctgcgggcggcgggccgcaggacgcctacgaggccatgaagtcggtcttcggggtcatcaagcagcctggcgccgacgacctcctggagctggcgcagtaccagctggcctcggccaaggccgcgggcaagccctacctgaacgccgccttcgccaagccgacgggcttcgtctccaacggcaagatcgagaagttcaccgcccagctgcccgccaatggcaaggcggccctggaggcatacaagaaggcgaagcagcagggcctcggcccgatcaacaccaacaagctggtcaagaagatggcgggctacgagccctccgcaaccatgaaggtcaagctgaaggaggcagcggagtacgagctcaagaagcagggcacggccaccgtctccttcaacgaggcgaccgtcgccaagaagcagggcgtggcccccaccgcggtggacatgacggcctcccggccggcctccaccccgcgcgacggcctgccgccccctccccggtactcgggagcccagcgcgcagctggcgtgcgcaagttcgccaacgggctgccgaccggcgacctggcggcgatcaatgccaagcagcgatcgatggggctccaggagctaacggcggaggaagtcgcggcggtaaaggcctatactggaaacacctaccgggcgctgaacaacgcgctccgggcgggcaagtactcgtcggacccgcacctgcaggcctacgtggacgcggcccagcacggcatgtccaagatgccgaagttccagggcctcagctcccgcggcatgacgttcaacgactcgcagttgaagaccatgctgtccacgtaccgcaagggcgccgtcgtcgaggactccgccttcgtctcgtcgtcctacggcgagcaggcggcgttcagcggcaacgtgtacatgaggatcaacggcaagaccggcgtgaacatctcccagtactcgtactacaagaccgagcgcgaggtgctgttcatgcctggcacccggttccgggtggacgacgtgactcagcagaacggcaagtacatcatcacagtgacggaggtttgacatggcggacgagttcgaggcgggcccggagtgggagggcaagatggacttcgccccgggggtgcccgaggaccccgacgcggtgccggagctgttctaccaggtgctcctgggcagggtctacaccctgaccaggtggaaggacgggtccacgggccggggcgaggtgcagctggccgacctcgaggcgctcgcgggaggcccgatcaccagggagggctggtatgacgccctggggaagtaccagggcacggagctgccaggctccctgtaaaagaggcccgccgcaatggcgggctttctctttctgcttgaacgttggcttgcgtgggcccggtgccggcggtaaggtgccagcctatacaccccgggcgcgacgcccaatagccagcgcgtgatgcgcagaaggagataagatggacttcgagttcctgaagaaccccaccgtcgacagcatcgacaaggtcccggaacagttccgcggcttctacggcgagggcgagggcggctacgtcctgcaggacagcttcaagggcactgccaccgcggtggacggcctgaacaagtccctgaaggcggcccgccgcgacgccgatgaggccaagcgcaatcgccccgacatggccggcttcgccgcgatcggccagctcctcggcctggagggcgacgatgccacctcggccgaggccctgcgcgctggcgtcgagcgcatcatcagcgagtcgaaggacggcaaggtcaactgggacaagatgaagcagtccctggagagcggcttcaacaccaagctgtcggccaaggacgccgagatccagggcatgggcaagtccctgcagaagtacctggtgacctccgccgcggtccaggcgatcgccgcccacaagggcgtgccggacctgctgctgccgcacatcaccgcccgcaccaaggtcgtcaaggacggcgaggactacgtggtccgcgtggtcgacgactcgggcgacccgcgcggcaacgcctcgggcggcttcatgacggtcgaggacctggtcaaggagctcaagggccaccagaccttcggccgggccttcgagagcgaggcacccaacggtggcggcaagccgccgggctcgggcaacaaggctcccgtcggcaagccgggcgagctgaccgccaaccagaagatcgccgccggcctggcgaagcgccgccagggctgatccaacaattgtgcaaaaggaagggcgcctcagggcgccctttctctttacagcgacaggaccgtcaggctctgtcgcaggtccgtcaggacctggccgagccagttggtgccctgccagagcgacctgtcgtggacccgcgggtccagctcgtccaggcccacgccccagatgacgtcggtcgggctggcctccaccagggtggtgccctcggtgagcaggagctgggcccgcagcttcgggtcgctggtgaacttgtgcaggctggcccgcatcacgacgtcgcgggacaccgagtcccactgccgacggtcgaacccgcgcaccttccgaccgatggccttctgctccgccgggttcgaggtcgccatgatggcgtccagggcctgctcgtccccgaagaccctcgccttctgggccatcatgtactgctcagcgcagccgtactgtacgccgtcgatgaccatcggtgacgggtaccactggctgaagaccccgccgtagaacggggtgaagcgctcttgctctttcatgggaaaactccttctgaatcagggggttacagtgtaccgtcagacgcgcttggaggtcgcggacggcatgacgggcggcggggcctcgtggacggacaccgcctggagcacgaagaagcgggtgcccgggtggaggttggcgaggcgcagcgcctcactgtcggcgctggtgctctggaagtgcaccgccttcggcgggttcttgagcgccggacggcccgcctggcatccgtccttgtaggcgtcggcggacgccaccaggtagaagcgcccgtccgagatctcggacgtgccgcgctccgggttccagacgacgtcggcgcgcttccggccggtcgagcggcccacgacgctgtcgacgacctgcttgcccttctcggtcagggtcggcggctggttgcccgccgggtcgaagtcgatcaggtcgtcggccacgaggaaggtgatgtccggcgggggcaggccgcggacgtgctgcatgctggagaagcccatggcgatcgtcagcagggtgcgcaggcgggactcgggcgaggtcggggtgacgcggggcttcggcggcgccggcttcggcgcctccacgggctcgaagtcggaggccacgatcaggtcgcggctcacgccgagctgctccagccggcaggcgatggcgtgctcggtgcggccgtgcgccctcgacagcttggtcaggttgatcttgccggcggcggccaccagtaggtcgcgctcctctgcctccgtccacggggcaccgccgcgcggggcgactgtcgggtgggcagagttgccgaccagcgtcgaccagccgcgctttaccgcgatggcgtgggatggctggcggaagcgcgagaagatgagggagaacgctgcctcggcgaaggcgtcgaggtagtcgtcggggatcaggtacaggtcgtcgaagtccatgggactctccttggttggtggacacgggcatcatggcgcccaattaggtgatacaatgccactgtttagagggtgtggcgctcctgcatgaggaccttggcacggtcccacgcgctgttccacaggtcgcagacctcctgcggcatgtcgtcgtcttcgtcggcgcgcccgtaggtggacggatccacgccgaggctctggaaggcggcgtccatcaccatgttggagtcgcagaagtcccccgagttgcagacgtcggggttcagctccgaggcgttcagctccacgacctcgtcgtaggcctcgaccccaatggtctcgcgtaggatgcgaaggaaggcttcggccagcggttcgatctcgggcaggcccatcacatctctcccatgaccttgaggaacgactctgcgccctcgaagatcatcttgtgcatgtccatgtcctccgcctcgagcatgctgttgtcgttgagggccacctcgacggtggtgaacgacgcctccgcagtctcgatggcgtcgagcgccgtggcgtaggccatgagggtgatgggcgcgatttccaggtcgcgcagcagctgcatcacctgcgcgaggtcctccacgggcgtgtcttcgaggttcttgtatttgacggtcatggcggcttcctagcgaagtgaggtgtagaggtcgtcgaggacggccttgcggtcctcctccgacaggtcgtcgtactcgggcagcgatcgcacggcgtctatggggccaaacgagtcgtgtgccatcatgtccatcatgtcgatggcgcgaagcgccatcgcatgacggtcggcgtctgagagggccatcagagcttcctcagctccgacacctcggactcgatgccggacatctcccacaggtgggtgcgcttgacgcggccgtccgcggtgatagccatgatgggcgactcgtcgccgagggtggggtgctcgtacaggtccaccccgccggccgagccgaagtaggtggggttctttgccatgaaggcgatagccttctcggtggtgggcttgttccgggccatgtagtttaccagtttgcgttggtgtgagtccattatacggggtcttttggtacatgggagccccctggaagaactgtttttattctttttattagatctaaagaaataagggtatctaaggcagtcttaccctccctctagggcagtccggcctctaagtccttgtcgcagctggaccgtctagggcttctaggccttctagggctgttcctcgagccgtggccggacctggaacctggccgatttcctgggacaacgacgtgccaaaggctcgtttcggctcagatacggcttaagtccttggtccgtaaagctttttctcgtctaaggcgcgcttccggaggtccaggaggctcagattctcgcgctggaccagcgttcatggggttacgagctcggaccgtcacggcaaagtcccgaaccatagcacgcgagcacggtcataccctgccgcgctcgctgaccctgcagaggcgtgatgccttggcccaggggtcgaatcgtcgggcgatccggcacctttcccaagcatcccaccacccgcctcccaggagaaccctaatggcatccgttaccctcgccgagtcggcgaagctggcccaggacgagctcgtcgctggcgtcatcgagaacgtcatcaccgtcaacgagatcttcgagcagctgcccttcgacggcatcgacggcaacgccctcgcctacaaccgcgagaacgtgctgggcgacgtccagatggctggcgtcggctcgaccatcaccgccaagaacccggcgaccttcacccaggtgacctcgaccctgaccaccatcatcggcgacgccgaggtgaacggtctgatccaggccacccgctcgggcgacggcaacgaccagaccgccgtccaggtcgcctccaaggccaagtcggccggccgccagtaccagaaccagatggtgaacggcgacggcaccggcaacaatgtcgccggcctgttcagcctggtcgcgggcagccagaccatcaccgccaacaacggtgctgcgaacggcgcgggcctgtccttcgaggacctggacgccctgatcgacctcgtcaccgacaaggacggccaggtcgactacctgatgatgcactcccgcacccgccgcaagtacctggcgctgctgcgcgccctgggcggcacctcgccgggcgacgtgtacaccatggcgtcgggccgcaccgtgccggcctaccgcggcatcccgatcttccgcaacgactggatcccgatcacccagacccagggtacctccacgaacgccacctcggtgttcgccggcaccttcgacgacggcagccgcacccacggtatcgccggcctgaccgccgagaagcaggcgggcatgcacgtcaagtacgtgggcgagaaggaggatgccgacgagagcatcacccgtatctcctggtactgcggcctcgcgctgttcagcgagaagggcctggccgtgctgaagggcgtgaccccggcctaatccgccggcgtcactgatctcggttagcccgccggcgcaatgccggcgggcgcttaatgggagacaggaaacatgagcgcacacctcgtacgcctgagcggctcgcgctgcgggcagaccctgtacgacaagtccgacgccgtcatcgtctgggttgacgacgactcgaccaccaagccggcggatgcccgcgcggcggcggccgcagctcgccccggcccggacggctactggagcgacgctgtcgtggtggagctgagcgaggccaacctcgccaccgccatcccgatgcgaaccgtcaactgagcaccacgggccctgccggtacgccggcggggcttcgtggcctataggccaagagaaaggagtggacatcatgtccagcaagacccagcgcttcgtcctggtgggaccgcaccagggcaagaccatgaacgtcaacggtcacgagttcgtcgacggcgagtacgagttcgccggcaacgacgggcagatcgccagcctcacccgcgtcttcggcttctacggcgccctgccggcagagcaggccgagctgcaggagctgcgctccaagcagggcggcagcaagccgacccgcaagcagctggacgaggccatcgccgccctgccgggcgagaacacggacgcggactacgtggtcggcgccatgcgctcccacttcggcgacctgttcacctcgggcgacgagctgatggtgcgcgaggtcgtgattgccccgtcgggtgaaaacaccaacgcggaccaggcgaccgtgggccagaacaccaacacgcaggaaccgcccgccccgccggcactgccgagcctggctgaggccatcggcctgctggacccggccgccgaccaggactggacgtccaacaacctgccgaacctcgagcgcctcgaggccctgaccggcaagaagccgtcccgcgccgacgtcgacgcgatcgccgacggctacacccgcgccaaggcgaaggccgccaaggcctaagcccactgacagacccacaggagaggatcgacccatggcattcaaccagcaggacaacgacggcacggtcgacggcgccaacgcctacaccgaccccgccaccgtgcgcgcctactgggcggaccgcggcgtcgacctctccaccaagacggataccgagctccagcaggcgatcgtgaacgcgacgacctacctcgacgcccggtactcgtgggtgggctggcagcgacgccgcctccagggcacccagtggccccggggcggcgtcacctcattcctccgcggcctgccgcccgccctcactgtggcggtgtgcatggtcgcgaaccgcgccctctcgggcaagccgctcatgccggaccccacgttcgatgcgagcggccagaaggtcacccaggtgacgaagaaggtcggtccgatcgagctctcgaccacgttcgccgagagctccggggctagcctggcggccgcgacgccgcagttcccggaggtcaccatgacgctgcagcaggccggcctcgtcgagtctggcaactccggccggctgtcgaggggctgacatggcgaccttcgactaccagggcatgaaggacgacgtcgacgcgctgctggccgagtttggccagtcctgcaagctccgtcgtcctggcggcccggtcgtggtggacccggtcgacgggaccgtgacccccggctccggcccgaccgacttcccggtcgtcggcgtcatcaccgactacagcgacaagcaggtcgacggcgagaacatccgccgcggcgaccggctggtctacatacaggcggtcgagcgcccgaagcagggcgacgtcttcctggaggagagcggcacccagtgggccatcgtggacttcgactcggtcgatccggcgggcctggccctgctgttcgccctgcagctccggaggtaacgtggcgcgcttcgagcagcagctgaaggggttcggcgtcaagaccctgaagaaggtggaccagatccggcgggcctcggtcctcgagctcttcaagctggtgatcttcgcgacgcctgtcgacaccggccggctgcgaggcaactggcagacgaccatcaactcaccgaactgggccgcgatcgaccggcttgacctgggaggcggcgcggccatgtcagaggccgtcgccaacctgggctcgctggtcgacgtggtctggttcacgaacaacctgccgtacgtcgagaggatcgagtacgacgggtggagcaagcaggctccggagggcatggtgcgcaggcacgtggcctcctggaagcggatcgtggccgccaaggcccgggcattcggcaagtaagggacagcatggctaccaacacctacagcgggctggacatggcgctgcgccagggggtcaaggactccccgctcgccctgccctacgccctgccgaacgccccgttcgacaagccgtcggaccagagcccctgggcctcggtcttcatcatgggcaaccagccctccgtcgccaccctgggcgacgagggccaagacgcccacgacggcatcctgcagatcgacctgaactacccactcaacaccggcgaggcggccgtgacggccaaggcggacgagctgactgactacttcaaggcgggcaagcgacttgcccactcgggggtcgagcttacggtggcctcgtgcggccgctcacgcgggcgcgaggtcgatggctggtaccgcgtgagcatgaccgtcacctggttcgcccgggtctctcgaaactaatccacagtaggagcgtaccaccatggcaaacggcagccgccactccatgcgctacgtcgccgagaccgtct